(19) United States
(12) Patent Application Publication
(10) Pub. No.: US 2024/0199750 A1
(43) Pub. Date: Jun. 20, 2024

(54) MULTISPECIFIC PROTEINS COMPRISING AN NKP46-BINDING SITE, A CANCER ANTGIENGE BINDING SITE FUSED TO A CYTOKINE FOR NK CELL ENGAGING

(71) Applicant: INNATE PHARMA, Marseille (FR)

(72) Inventors: Stephanie CORNEN, Marseille (FR); Laurent GAUTHIER, Marseille (FR); Yannis MOREL, Marseille (FR); Olivier DEMARIA, Marseille (FR)

(21) Appl. No.: 18/283,385

(22) PCT Filed: Mar. 24, 2022
(86) PCT No.: PCT/EP2022/057824

§ 371 Date: Sep. 21, 2023

Related U.S. Application Data
(60) Provisional application No. 63/166,374, filed on Mar. 26, 2021.

(51) Int. Cl. C07K 16/28; A61K 39/00; A61P 35/00; C07K 14/54; C07K 14/55; C07K 14/56; C07K 14/565; C12N 5/0783

(52) U.S. Cl. CPC C07K 16/2866; A61P 35/00; C07K 14/54; C07K 14/5418; C07K 14/5434; C07K 14/5443; C07K 14/55; C07K 14/56; C07K 14/565; C07K 16/2803; C07K 16/283; C12N 5/0646; A61K 39/00; A61K 2039/505; C07K 2317/31; C07K 2317/92; C07K 2319/30

(57) ABSTRACT

Multi-specific proteins that bind to NKp46 and a cytokine receptor on NK cells, and optionally that further bind CD16A on NK cells, and that also bind to an antigen of interest (e.g. a cancer antigen) on a target cell (e.g. a cancer cell). The multi-specific proteins are capable of increasing NK cell cytotoxicity toward a target cell that expresses the antigen of interest (e.g., a cell that contributes to disease, a cancer cell).

### CROSS-REFERENCE TO RELATED APPLICATIONS

[0001] This application claims the benefit of U.S. Provisional Application No. 63/166,374 filed 26 Mar. 2021, the disclosure of which is incorporated herein by reference in its entirety; including any drawings and sequence listings.

### REFERENCE TO THE SEQUENCE LISTING

[0002] The present application is being filed along with a Sequence Listing in electronic format. The Sequence Listing is provided as a file entitled “NKp46-12 PCT_ST25 txt”, created Mar. 22, 2022, which is 820 KB in size. The information in the electronic format of the Sequence Listing is incorporated herein by reference in its entirety.

### FIELD OF THE INVENTION

[0003] Multispecific proteins that bind and specifically redirect effector cells to lyse a target cell of interest via interaction with multiple receptors are provided. The proteins have utility in the treatment of disease, notably cancer or infectious disease.

### BACKGROUND

[0004] Interleukin 2 (IL2 or IL-2) is one example of a pluripotent cytokine that acts on a cytokine receptor expressed by NK cells. IL-2 is mainly produced by activated T cells, especially CD4+ T helper cells, and functions in aiding the proliferation and differentiation of B cells, T cells and NK cells. IL-2 is also essential for Treg function and survival. In eukaryotic cells, human IL-2 (uniprot: P60568) is synthesized as a precursor peptide of 153 amino acids with a 20 residue signal sequence, that gives rise to a mature secreted IL-2 having the amino acid sequence of SEQ ID NO: 404. Interleukin 2 has four antiparallel, amphiphilic alpha helices. These four alpha helices form a quaternary structure that is essential for its function. In most cases, IL-2 works through three different receptors: interleukin 2 receptor alpha (IL-2Rα; CD25), interleukin 2 receptor beta (IL-2Rβ; CD122), and interleukin 2 receptor gamma (IL-2Rγ; CD132). IL-2Rβ and IL-2Rγ are essential for IL-2 signaling, while IL-2Rα (CD25) is not necessary for signaling, but can confer high affinity binding of IL-2 to receptors. The trimer receptor (IL-2αβγ) formed by the combination of IL-2Rα, β, and γ is the IL-2 high affinity receptor (KD about 10 pM), and the dimer receptor (IL-2βγ) is an intermediate affinity receptor (KD about 1 nM).

[0005] Immune cells express dimer or trimer IL-2 receptors. Dimer receptors are expressed on cytotoxic CD8+ T cells and natural killer cells (NK), while trimer receptors are mainly expressed on activated lymphocytes and CD4⁺CD25+FoxP3+inhibitory regulatory T cells (Treg). Because resting effector T cells and NK cells do not have CD25 on the cell surface, they are relatively insensitive to IL-2. Treg cells consistently express the highest level of CD25 in the body. Due to the low concentrations of IL-2 that typically exists in tissues, IL-2 preferentially activates cells that express the high affinity receptor complex (CD25:CD122:CD132), and therefore under normal circumstances, IL-2 will preferentially stimulate Treg cell proliferation.

[0006] IL-15, IL-12, IL-7, IL-27, IL-18, IL-21, and IFN-α share many aspects of receptor binding, complex assembly and signaling with IL-2. For example IL-15, IL-21 and IL-7 like IL-2 both act on NK cells via the common-γ chain receptor (CD132). IL-15 binds to the IL-15 receptor (IL-15R) which is composed of three subunits: IL-15Rα, CD122, and CD132. Two of these subunits, CD122 and CD132, are shared with the receptor for IL-2, but IL-2 receptor has an additional subunit (CD25). IL-15Rα (CD215) specifically binds IL15 with very high affinity, and is capable of binding IL-15 independently of other subunits. IL-21 is another example of a type I cytokine, and its IL-21 receptor (IL-21R) has been shown to form a heterodimeric receptor complex with the IL-2/IL-15 receptor common gamma chain (CD132).

[0007] NK cells have the potential to mediate anti-tumor immunity. However, NK cells have been shown to cause toxicity in mice through their hyper-activation and secretion of multiple inflammatory cytokines when IL-2 was administered together with IFN-a (Rothschilds et al, Oncoimmunology. 2019; 8(5):). In addition, NK cells were also shown to cause toxicity of the cytokine IL-15 that also signals through IL-2Rβγ (see WO2020247843 citing Guo et al, J Immunol. 2015; 195(5):2353-64).

[0008] One potential solution to the immune toxicity mediated by cytokines such as IL-2 was to fuse it to or associate it with a tumor-specific antibody. However, it was found that that while IL-2 indeed synergized with antitumor antibody in anti-tumor effect in vivo, the inclusion of IL-2 and anti-tumor antigen antibody in the same molecule presented no efficacy or toxicity advantage. The IL-2 moiety entirely governed biodistribution, explaining the observation that immunocytokines recognizing irrelevant antigen performed equivalently to tumor-specific immunocytokines when combined with antibody (Tzeng et al. Proc Natl Acad Sci USA. 2015 Mar. 17; 112(11): 3320-332).

[0009] Studies focusing on the effect of cytokines on NK cells have generally focused on single cytokines or simple combinations. More recently, it has been reported that IL-15, IL-18, IL-21, and IFN-α, alone and in combination, and their potential to synergize with IL-2, and that very low concentrations of both innate and adaptive common γ chain cytokines synergize with equally low concentrations of IL-18 to drive rapid and potent NK cell CD25 and IFN-γ expression (Nielsen et al. Front Immunol. 2016; 7: 101). However, administration of cytokines to humans has involved toxicity, which makes combination treatment with cytokines challenging. Furthermore, little remains known on potential synergies or interaction between cytokine receptor signaling pathways and other activating receptors in NK cells. There is therefore a need for new ways to mobilize NK cells in the treatment of disease, particularly cancer.

### SUMMARY OF THE INVENTION

[0010] The present invention arises from the discovery of functional multi-specific proteins that bind to NKp46 and a cytokine receptor on NK cells, and optionally that further bind CD16A on NK cells, and that also bind to an antigen of interest (e.g. a cancer antigen) on a target cell (e.g. a cancer cell). The multi-specific proteins are capable of increasing NK cell cytotoxicity toward a target cell that expresses the antigen of interest (e.g., a cell that contributes to disease, a cancer cell).

[0011] The multi-specific protein's ability to bind, in cis, to NKp46 and to the cytokine receptor (and optionally further through CD16A) at the surface of an NK cell is believed to lead to a particularly advantageous cell surface receptor signalling, in turn resulting a potent anti-tumor response by NK cells.

[0012] IL2-mediated immune toxicity is known to be driven by NK cells. However, the multi-specific proteins of the disclosure bearing an IL-2 moiety displayed a strong NK-cell mediated anti-tumor activity without immune toxicity. The incorporation of a cytokine in the multi-specific proteins increased the potency of cytokine-receptor-mediated activity in NK cells by two orders of magnitude, compared to the cytokine alone. In parallel, when binding both NKp46 and CD16A and comprising a cytokine (IL-2 variant) that substantially retained the affinity for its receptor on NK cells of the wild-type IL-2, the multispecific protein displayed an EC50 for induction of cytotoxicity toward tumor cells that was well below its EC50 for induction of NK cell proliferation. The multispecific proteins will therefore be highly effective in activating NK cell-mediated cytotoxicity at the concentrations where they begin to induce significant cytokine-receptor signalling and/or NK cell proliferation, even when the cytokine is attenuated. This may explain the observed lack of toxicity, as the concentration (e.g., dose) of protein that is used (e.g., administered) can be highly efficacious yet remain below the level that causes NK-cell mediated immune toxicity. The proteins therefore represent a versatile platform that can readily integrate different cytokines and different levels of attenuation for cytokines.

[0013] When the protein was made to incorporate a CD122 ABD embodied as a IL2 variant with loss of binding to CD25, the multispecific protein displayed a 4-log decrease in ability to induce signalling in and/or activation of Treg cells compared to native IL-2. When combined with the aforementioned 2-log increase in the ability to induce signaling in NK cells compared to the native IL-2, the multispecific proteins have a 1,000,000-fold increase in potency for induction of cytokine receptor signaling in NK cells compared to in Tregs. Accordingly, the CD122-binding multi-specific proteins can be used at concentrations where they mediated NK cell proliferation and/or infiltration while minimizing Treg proliferation that may negatively affect the anti-tumor response.

[0014] The proteins employed displayed highly favorable in vivo efficacy despite being designed to bind their targets on tumor cells only in monovalent manner. By avoiding the increase in affinity caused by multivalent binding to a target antigen on tumor cells, the monovalent binding to the tumor antigen, NKp46 (and CD16A) and cytokine receptor permitted the multispecific protein to be readily tuned. It was observed that each ABD (i.e. the tumor antigen ABD, CD16A ABD, NKp46 ABD and cytokine receptor ABD) provided a distinct contribution to the potentiation of NK cell-mediated anti-tumor activity in vivo. The exemplary proteins with monovalent tumor antigen binding incorporated a cytokine with an affinity that confers binding to its receptor on NK cells that is not higher than the affinity conferred by the NKp46 ABD for NKp46. Anti-tumor cell activity was higher than comparable conventional antibodies even though conventional antibodies bind bivalently and therefore typically have considerably higher binding affinity for their target.

[0015] In vivo, the multispecific protein dramatically increased NK cell infiltration in tumors; the multispecific protein caused a 9-fold increase in NKp46-expressing NK cells in tumors, compared to 1.3-fold increase by gold standard ADCC-inducing antibody obinutuzumab that shared the same anti-tumor VH/VL pair, and compared to a 1.6-fold increase by the same multispecific protein lacking the CD122 ABD.

[0016] The examples made use of a variant IL-2 cytokine (IL-2v) which was modified to reduce affinity for its receptor(s) on T cells (CD25) but retained substantially full affinity (comparable to wild-type IL-2) for its receptor on NK cells (CD122 and/or CD132). The NKp46 binding domain (exemplified as a VH/VL pair comprised in a Fab or scFv), the CD16-binding Fc domain and the cytokine were placed adjacent to one another in series within the protein, each separated from the adjacent element (i.e. NKp46 ABD, Fc domain or cytokine) solely by a short flexible peptide linker. These configurations of multispecific proteins were designed to present the respective antigen binding domains so as to permit co-engagement of NKp46 and cytokine receptor on the same cell surface plane (i.e. in NKp46, cytokine receptor (and further CD16A) are bound in cis). Further, the examples used a Fc domain that binds CD16A, showing that binding to CD16A does not negatively affect the tumor and NK-targeted biodistribution and instead led to triple co-engagement of NKp46, CD16A and cytokine receptor, and in turn permitted the incorporation of a cytokine that retained binding affinity for its receptor on NK cells. By incorporating into the multispecific protein anti-NKp46 VH/VL domains that conferred a binding affinity for NKp46 in the low nanomolar range for the KD (KD of about 15 nM), cytokines could be used that retained good affinity, optionally substantially full binding affinity, for their receptor on NK cells sufficient to mediate potent signaling in NK cells. Typically, cytokines such as the ones described herein generally have an affinity for binding to their receptor on NK cells that is no stronger than that of the affinity of the multispecific protein for NKp46 (affinity can be determined as the KD).

[0017] It is believed, in view of these results, that targeting the cytokine, e.g. a type 1 cytokine such as an IL-2, IL-15, IL-21, IL-7, IL-27 or IL-12 cytokine, an IL-18 cytokine or a type 1 interferon (e.g. IFN-α, IFN-β), to an NKp46-bearing NK cell surface promotes cis-presentation to the cytokine's receptor (e.g. IL2/15βγ, IL-21R, IL-7Ra, IL-27Ra, IL-12R, IL-18R, IFNAR), as shown in FIG. 1 for the cytokine IL2 and cytokine receptor complex IL2βγ). As shown herein, IL2v placed immediately adjacent to (and on the C-terminal side of) either a CD16A-binding ABD or NKp46-binding ABD permitted the triple receptor cis-presentation to occur (the IL2v was connected to the adjacent domain by a linker peptide of as little as five amino acid residues). Advantageously, use of a dimeric Fc domain nas the CD16A-binding ABD provides FcRn, in turn conferring a half life sufficiently long to induce tumor infiltration and proliferation of NK cells in vivo.

[0018] The multispecific proteins directed to NKp46 on NK cells have the advantage that they permit a range of cytokines to be used and/or tested without a requirement for reduced binding affinity for their receptor on NK cells (e.g. CD122). The cytokine therefore may or may not be modified to attenuate or decrease binding affinity for its receptor. The multispecific proteins directed to NKp46 on NK cells can thus make use of any one of several cytokines in their wild-type form, particularly where the cytokine does not have substantially reduced activity at its receptor on NK cells, and/or where the cytokine's affinity for its receptor is no stronger than the affinity of the NKp46 ABD for NKp46. Accordingly, in any embodiment, the cytokine ABD (e.g. cytokine moiety within the multispecific protein) can be specified as having a binding affinity and/or an activity (e.g. induction of signalling) on its receptor on NK cells that is not substantially reduced compared to the wild-type form of the cytokine. Optionally, the cytokine moiety induces signalling at its receptor on NK cells (e.g. CD122) that is at least 70% or 80% of that observed with the wild-type form of the cytokine. Accordingly, in any embodiment, the cytokine ABD (e.g. cytokine moiety within the multispecific protein) can be specified as having an affinity for its receptor on NK cells that is not substantially reduced compared to the wild-type form of the cytokine. In some embodiments, the cytokine moiety has a binding affinity for its receptor on NK cells (e.g. CD122) that is within 3-log, 2-log or 1-log of that of the wild-type form of the cytokine (e.g. the cytokine moiety has a KD for binding to the cytokine receptor that is not more than 3-, 2- or 1-log higher than that observed for the wild-type form of the cytokine). Affinity can be KD for binding to recombinant receptor protein, as determined using SPR. Signaling or receptor binding affinity of cytokines can be specified as being when incorporated into an otherwise equivalent multispecific protein.

[0019] The high efficacy combined with low immune toxicity is therefore a particular advantage of a therapeutic molecule that combines the ability to bind each of NKp46 and cytokine receptor (e.g. CD122), and further CD16A, on an individual NK cell, particularly for a therapeutic agent having a long in vivo half-life. In particular, the incorporation of an Fc domain that binds FcRn permitted a half-life sufficiently long to permit NK cells to proliferate and accumulate at the site of the tumor, in vivo.

[0020] The multispecific proteins are particularly advantageous due to high potency in enhancing NK cell activity (e.g. NK cell proliferation, activation, cytotoxicity and/or cytokine release, including by tumor-infiltrating NK cells), yet with low immune toxicity, as evidenced by low systemic increase or release of cytokines IL-6 and TNF-α. The present disclosure provides examples using protein formats that permit sufficient distance between NKp46 and cytokine receptor (e.g. CD122) and CD16A binding domains to permit all three receptors to be bound by a single NK cell, thereby providing combined NK cell receptor activation. Importantly, the combined binding on a single cell may account for the minimal off-target immune toxicity and lack of fratricidal killing of NKp46-expressing and/or CD16-expressing cells (e.g., NK cells) because the multispecific protein is bound by at least one activating receptor in addition to cytokine receptor (e.g. CD122) at the surface of the NKp46 and/or CD16+ effector cell.

[0021] The multispecific proteins are further advantageous due to their ability to potentiate the activity and/or proliferation of both NKp46⁺CD16⁺ and NKp46⁺CD16A⁻ NK cells. As shown herein, combined dual binding to NKp46 and CD122, in the absence of binding to CD16A, demonstrates strong potentiation of NK cell activity. In healthy individuals, the CD16⁻ population represents 5-15% of the total NK cell population, while in some cancer patients the proportion of CD16⁻ NK cells is greatly increased, making up as much as 50% of the total NK cell population. Further, the tumor micro-environment has been shown to affect the phenotype of CD16A⁺ NK cells by either inducing shedding of CD16A from the surface of the cells or promoting conversion from CD16A⁺ to CD16⁻ NK cells. In addition, due to CD16A polymorphism, some individuals have mutations in CD16A (e.g. at residue 158 of CD16A) that result in reduced ability to mediate ADCC. Overcoming CD16A deficiencies, for example as may occur in the tumor environment, while increasing both the number of and activation of NKp46+ NK cells in the tumor, is particularly advantageous. Yet further, multispecific proteins do not require binding or signaling via NKG2D and can be used to potentiate NK cell activity in patients having NK and/or T cells characterized by relatively low levels of surface expression of the activating receptor NKG2D, for example as is known to be a general or common feature in gastric and prostate cancer.

[0022] Provided, inter alia, is a multispecific protein comprising: (a) a NKp46-binding domain that binds to a human NKp46 polypeptide, (b) a binding domain that binds an antigen of interest (e.g. a tumor-associated or cancer antigen; an antigen of interest present expressed by a target cell), (c) an optional CD16A-binding domain (e.g. an Fc dimer) that binds to a human CD16A polypeptide, and (c) an antigen binding domain that binds to a human cytokine receptor polypeptide expressed on NK cells (e.g. a receptor such as CD122 (IL2/15Rβ), IL-21R, IL-7Ra, IL-27Ra, IL-12R, IL-18R, IFNAR (IFNAR1 and/or IFNAR2). Provided also, is a multispecific protein comprising a NKp46-binding domain that binds to a human NKp46 polypeptide, a binding domain that binds an antigen of interest (e.g. a tumor-associated or cancer antigen; an antigen of interest present expressed by a target cell), an Fc domain (e.g. an Fc domain dimer) that is bound by human FcRn (and optionally that is further bound by a human CD16A polypeptide), and an antigen binding domain that binds to a human cytokine receptor polypeptide (e.g. CD122 (IL2/15Rβ), IL-21R, IL-7Ra, IL-27Ra, IL-12R, IL-18R, IFNAR (IFNAR1 and/or IFNAR2). The antigen binding domain that binds a cytokine receptor can be a variant cytokine having a modification that reduces binding to a receptor counterpart found on non-NK cells (e.g. T cells, Treg cells) compared to its wild-type form.

[0023] In any embodiment, the ABD that binds to a human NKp46 polypeptide and the ABD that binds a human cytokine receptor can be specified as being configured to be capable of adopting a membrane planar binding confirmation.

[0024] In any embodiment, the multispecific protein can be specified as being capable of interacting with, binding to or co-engaging NKp46 and the cytokine receptor, and optionally further CD16A, on the surface of an NK cell.

[0025] In any embodiment, optionally the ABD that binds to a human NKp46 polypeptide and the ABD that binds a human cytokine receptor, and optionally further the Fc domain, are specified as being positioned or connected within the multispecific protein in series (e.g. with respect to the N- and C-termini of the multispecific protein).

[0026] The ABD that binds NKp46 (e.g. a Fab, single variable domain or scFv) can optionally be specified as being connected to the CD16A− binding domain (e.g. an Fc domain) by an Ig-derived (e.g. a peptide from a hinge domain or heavy or light chain constant domain) or non-Ig-derived domain linker, optionally wherein the domain linker is a flexible polypeptide linker. The ABD that binds a cytokine receptor can optionally be specified as comprising a wild-type or variant cytokine connected to the rest of the multispecific protein or to the NKp46 ABD by a domain linker, optionally a flexible polypeptide linker. The cytokine can be specified as being positioned C-terminal to both the NKp46− and CD16A− binding domains on the multispecific protein, and optionally further the cytokine is connected to the rest of the multispecific protein (or e.g., a domain thereof, the NKp46 ABD) via a peptide linker of 15, 10 or 5 residues or less. The NKp46− and CD16A− binding domains can optionally be specified as being placed adjacent to one another on the multispecific protein and optionally connected to one another by a peptide linker (e.g. an immunoglobulin-derived linker such as a hinge-derived linker, a non-immunoglobulin-derived linker, a flexible linker) having a length of 15, 10 or 5 residues or less.

[0027] In one embodiment, the ABD that binds to a human NKp46 polypeptide is positioned adjacent to the Fc domain within the protein (or on a polypeptide chain thereof), and wherein one of the ABD that binds to a human NKp46 polypeptide and the Fc domain are positioned adjacent to the ABD that binds a human cytokine receptor, optionally further wherein the ABD that binds a human cytokine is connected to the ABD that binds to a human NKp46 polypeptide or the Fc domain by a linker peptide having 20 or less than 20 amino acid residues, optionally less than 15 amino acid residues, optionally less than 10 amino acid residues, optionally between 5 and 15 residues, optionally between 5 and 10 residues, optionally between 3 and 5 residues.

[0028] In any aspect, the ABD that binds a cytokine receptor can be a human cytokine polypeptide, for example CD122 (IL2/15Rβ), IL-21R, IL-7Ra, IL-27Ra, IL-12R, IL-18R, IFNAR (IFNAR1 and/or IFNAR2). The ABD that binds a cytokine receptor can optionally be a human cytokine polypeptide (e.g. IL-2, IL-15, IL-21) that is modified (e.g. by introducing amino acid modifications) to reduce the binding affinity for a cytokine receptor to which it binds, optionally wherein binding affinity is selectively reduced for a receptor not expressed at the surface of NK cells or a receptor also expressed at the surface of non-NK cells (e.g. T cells, Treg cells). For example, the ABD that binds a human cytokine receptor can be a variant cytokine that displays reduced binding affinity for cytokine receptor present on T cells compared to the non-modified or wild-type cytokine polypeptide.

[0029] As further described herein, where a cytokine has more than one receptor as its natural binding partner and one of the receptors is expressed on non-NK cells, the cytokine polypeptide can be modified to reduce binding to such receptor that is expressed on non-NK cells (e.g. Treg cells, T cells) compared to its wild-type cytokine counterpart.

[0030] In one embodiment, exemplified by the protein incorporating the CDRs of the NKp46-1 VH/VL pair, the NKp46-binding domain binds to the D1/D2 junction of the NKp46 polypeptide. Based on x-ray crystallo studies of NKp46 complexed with the NKp46-binding domain, it is believed that the junction of the NKp46-binding polypeptide and the IL-2 moiety is positioned at about 70 Angstroms from the cell surface, which corresponds to the predicted distance from the cell surface for the cytokine binding site of CD122. As shown in FIG. 1C, binding to the D1/D2 junction of the NKp46 polypeptide and/or to the region or epitope bound by NKp46-1 can provide a positioning of the NKp46 ABD at a distance from the NK cell surface that permits optimal engagement of a cytokine receptor such as CD122. In turn, domain linkers of reduced length (e.g. between 2 and 5 residues, between 2 and 10 residues; 3, 4, 5, 6, 7, 8, 9 or 10 residues) can be used between the cytokine and the NKp46 ABD or rest of the multispecific protein without any decrease in potency. When other domains on NKp46 are bound, longer domain linkers can be used, e.g. between 5 and 15 residues, between 10 and 15 residues, or more. The proteins described herein with a limited number of very short linkers therefore have the advantage of having minimal non-natural (or non-immunoglobulin derived) amino acid sequences.

[0031] In one embodiment, the multispecific protein comprises an NKp46-binding domain or portion thereof fused, optionally via a domain linker, to a cytokine receptor-binding domain, e.g. a cytokine that binds a receptor expressed at the surface of an NK cell.

[0032] In one embodiment, the multispecific protein comprises an NKp46-binding domain or portion thereof fused, optionally via a domain linker, to a cytokine receptor-binding domain, e.g. a cytokine that binds a receptor expressed at the surface of an NK cell. In one embodiment, the portion of the NKp46-binding domain comprises a single variable domain (e.g. a first variable domain fused to a first constant domain) that, together with a complementary variable domain (e.g. a second variable domain fused to a second constant region), forms an ABD (e.g., a Fab) that binds NKp46.

[0033] In one embodiment, the multispecific protein comprises: (i) a first polypeptide chain comprising, from N- to C-terminal, an NKp46-binding domain or portion thereof comprising a variable domain, a human CH1 or CL constant domain, optionally a domain linker, and a wild-type or variant IL-2, IL-15, IL-21, IL-7, IL-27, IL-12, IL-18, IFN-α or IFN-β polypeptide, and
[0034] (ii) a second polypeptide chain comprising, from N- to C-terminal, a variable domain that associates with the variable domain of (i) to form a NKp46-binding domain, and a human CH1 or CL constant domain;
[0035] wherein one of the constant domains of (i) and (ii) is a CH1 and the other is a CL such that the constants domains of (i) and (ii) associate by CH1-CL dimerization. In one embodiment, the protein further comprises a dimeric Fc domain and an ABD that binds an antigen of interest.

[0036] In one embodiment, provided is a protein comprising a NKp46 ABD-cytokine unit. In one embodiment, the protein is a multispecific protein comprising a V_{H} and a V_{L} that associate to form an ABD that binds a cancer antigen or other antigen of interest, and a NKp46 ABD-cytokine unit (and optionally further a CD16A ABD (e.g. a dimeric Fc domain)). The NKp46 ABD-cytokine unit comprises an NKp46 ABD fused, optionally via a domain linker, to a cytokine that binds a receptor expressed at the surface of an NK cell.

[0037] In any embodiment herein, a multispecific protein can thus comprise a NKp46 ABD-cytokine unit that is formed from the association of two polypeptide chains and has one of the following structures:

[chemical structure]

[0038] wherein:
[0039] Vₐ₋₂ and V_{b-2} are each a V_{H} domain or a V_{L} domain, wherein one of Vₐ₋₂ and V_{b-2} is a V_{H} and the other is a V_{L} and wherein Vₐ₋₂ and V_{b-2} form an ABD that binds NKp46; CH1 is a human immunoglobulin CH1 domain and CL is a human light chain constant domain;
[0040] one of (CH1 or CL)ₐ and (CH1 or CL)_{b} is a CH1 and the other is a CL such that a (CH1/CL) pair is formed;
[0041] L, L1 and L2 are each an amino acid domain linker, wherein L, L1 and L2 can be different or the same, wherein L1 is a linker connecting the NKp46 ABD-cytokine unit to the rest of the multispecific protein (e.g., a protein comprising a V_{H} and a V_{L} and that associate to form an ABD that binds a cancer antigen); and Cyt is a cytokine polypeptide or portion thereof that binds to a cytokine receptor present on NK cells, optionally wherein Cyt is a wild-type or variant human IL-2, IL-15, IL-21, IL-7, IL-27, IL-12, IL-18, IFN-α or IFN-β polypeptide. The Cyt can be specified as having a free C-terminus (no further domains or amino acid sequences fused to the Cyt at its free terminus). Optionally, chain 1 can be specified as having a free C-terminus. “-” can be specified to indicate connection via covalent bond (e.g. peptide bond) to other amino acid residues.

[0042] In one embodiment, the NKp46 ABD-cytokine unit comprises: (i) a first polypeptide chain comprising, from N- to C-terminal, an NKp46-binding domain or portion thereof comprising a variable domain comprising an amino acid sequence at least 80%, 90%, 95%, 98% or 99% identical to an amino acid sequence of any of SEQ ID NOS: 3, 5, 7, 9, 11, 13, 112, 113, 115, 116, 117, 119, 120, 121, 123, 124, 125, 127, 128, 129 or 236-313, a human CH1 or CL constant domain, optionally a domain linker, and a wild-type or variant IL-2, IL-15, IL-21, IL-7, IL-27, IL-12, IL-18, IFN-α or IFN-β polypeptide comprising an amino acid sequence at least 80%, 90%, 95%, 98% or 99% identical to an amino acid sequence of any of SEQ ID NOS: 404-439 or to a fragment thereof of at least 40, 50, 60, 80 or 100 contiguous amino acids thereof; and
[0043] (ii) a second polypeptide chain comprising, from N- to C-terminal, a variable domain that associates with the variable domain of (i) to form a NKp46-binding domain wherein the variable domain comprises an amino acid sequence at least 80%, 90%, 95%, 98% or 99% identical to an amino acid sequence of any of SEQ ID NOS: 4, 6, 8, 10, 12, 14, 114, 118, 122, 126, 130 or 314-403, and a human CH1 or CL constant domain.

[0044] In one embodiment, the NKp46 ABD-cytokine unit comprises: (i) a first polypeptide chain comprising, from N- to C-terminal, an NKp46-binding domain or portion thereof comprising a variable domain comprising an amino acid sequence at least 80%, 90%, 95%, 98% or 99% identical to an amino acid sequence of any of SEQ ID NOS: 4, 6, 8, 10, 12, 14, 114, 118, 122, 126, 130 or 314-403, a human CH1 or CL constant domain, optionally a domain linker, and a wild-type or variant IL-2, IL-15, IL-21, IL-7, IL-27, IL-12, IL-18, IFN-α or IFN-β polypeptide comprising an amino acid sequence at least 80%, 90%, 95%, 98% or 99% identical to an amino acid sequence of any of SEQ ID NOS: 404-439 or to a fragment thereof of at least 40, 50, 60, 80 or 100 contiguous amino acids thereof; and
[0045] (ii) a second polypeptide chain comprising, from N- to C-terminal, a variable domain that associates with the variable domain of (i) to form a NKp46-binding domain wherein the variable domain comprises an amino acid sequence at least 80%, 90%, 95%, 98% or 99% identical to an amino acid sequence of any of SEQ ID NOS: 3, 5, 7, 9, 11, 13, 112, 113, 115, 116, 117, 119, 120, 121, 123, 124, 125, 127, 128, 129 or 236-313, and a human CH1 or CL constant domain.

[0046] In another embodiment where the NKp46 ABD-cytokine unit is placed on one polypeptide chain of a protein, the NKp46 ABD-cytokine unit can have the structure:

L1-Vₐ₋₂-L2-V_{b-2}-L3-Cyt
[0047] wherein:
[0048] Vₐ₋₂ and V_{b-2} are each a V_{H} domain or a V_{L} domain, wherein one of Vₐ₋₂ and V_{b-2} is a V_{H} and the other is a V_{L} and wherein Vₐ₋₂ and V_{b-2} form an ABD that binds NKp46;
[0049] L1, L2 and L3 are each an amino acid domain linker, wherein L1, L2 and L3 can be different or the same, wherein L1 is a linker connecting the NKp46 ABD-cytokine unit to the rest of the multispecific protein (e.g., a protein comprising a V_{H} and a V_{L} and that associate to form an ABD that binds a cancer antigen); and Cyt is a cytokine polypeptide or portion thereof that binds to a cytokine receptor present on NK cells, optionally wherein Cyt is a wild-type or variant human IL-2, IL-15, IL-21, IL-7, IL-27, IL-12, IL-18, IFN-α or IFN-β polypeptide. L1, L2 and L3 can each be independently specified as having a length of 15, 10 or 5 residues or less.

[0050] In one aspect of any embodiment herein, the cytokine or cytokine receptor ABD (either as a free cytokine or as incorporated into a multispecific protein) binds its receptor, as determined by SPR, with a binding affinity (KD) of 1 μM or lower, 200 nM or lower, 100 nM or lower, 50 nM or lower, or 25 nM or lower. In one embodiment, the cytokine or cytokine receptor ABD binds its receptor, as determined by SPR, with a binding affinity (KD) that is 1 nM or higher than 1 nM, optionally that is higher than 10 nM optionally that is higher than 15 nM. In one embodiment, the cytokine or cytokine receptor ABD binds its receptor, as determined by SPR, with a binding affinity (KD) between about 1 nm and about 200 nm, optionally between about 1 nm and about 100 nm, optionally between about 10 nM and about 1 μM, optionally between about 10 nM and about 200 μM, optionally between about 10 nM and about 100 nM, optionally between about 15 nM and about 1 μM, or optionally between about 15 nM and about 200 nM.

[0051] In one embodiment, the cytokine is a wild-type cytokine or a fragment or variant thereof that has at least 80% of the ability of a wild-type cytokine counterpart to induce signaling in NK cells, optionally wherein signaling is assessed by bringing the isolated cytokine moiety into contact with an NK cell and measuring STAT phosphorylation in the NK cells. In one embodiment, the cytokine is a wild-type cytokine or a fragment thereof that retains at least 70%, 80% or 90% of the affinity for its cytokine receptor present on NK cells, compared to the wild-type cytokine counterpart. In one embodiment, the cytokine is a variant cytokine, wherein the cytokine retains at least 70%, 80% or 90% of the affinity for its cytokine receptor present on NK cells, compared to the wild-type cytokine counterpart. In one embodiment, the cytokine does not comprise mutations that substantially reduce the affinity of the cytokine for the cytokine receptor present on NK cells. In one embodiment, the multispecific protein (or the cytokine when included in the multispecific protein) exhibits an EC₅₀ for cytokine pathway signaling in NK cells that is lower than that observed with its wild-type cytokine counterpart alone. In one embodiment, the multispecific protein (or the cytokine when included in the multispecific protein) exhibits an EC₅₀ for cytokine pathway signaling in NK cells that is lower than that observed with the cytokine alone or in a protein of comparable structure but lacking a NKp46 ABD and/or a CD16 ABD. Optionally the EC₅₀ for cytokine pathway signaling in NK cells is at least 10-fold or 100-fold lower, optionally wherein cytokine pathway signaling is assessed by bringing the respective cytokine or multispecific protein into contact with an NK cell and measuring STAT phosphorylation in the NK cells.

[0052] In one embodiment, the multispecific protein is configured such that an Fc domain (or CD16-binding domain), the NKp46-binding domain and the cytokine receptor-binding domain are each capable of binding to their respective NKp46, CD16A or cytokine receptor binding partner when such binding partners are present together at the surface of a cell (e.g. an NK cell). In some embodiments, the multispecific protein can be characterized by monovalent binding to NKp46 (e.g. the multispecific protein comprises only one NKp46 ABD), monovalent (or optionally bivalent) binding to antigen of interest, monovalent binding to CD16A (e.g. the multispecific protein comprises only one Fc domain dimer), and monovalent binding to cytokine receptor (e.g., the multispecific protein comprises only one cytokine receptor ABD).

[0053] In one embodiment, the multispecific protein is configured e.g., through placement or configuration of the domain within a multispecific protein, optionally through use of one or more using domain linkers having a maximal potential length of 18 Angstroms (5 amino acid residues), 36 Angstroms (10 residues) or 54 Angstroms (15 residues) when in a stretched configuration such that the NKp46-binding domain and the cytokine receptor-binding domain, and the CD16-binding domain when present and capable of binding CD16, can assume a membrane planar binding conformation such that each of NKp46, CD16A and cytokine receptor are bound at the surface of an NK cell.

[0054] The multispecific protein can thus be configured such that the cytokine receptor-binding domain is placed, topologically within the multimeric protein, terminally (e.g. C-terminal) to both the NKp46-binding domain and the CD16A-binding domain within the multispecific protein. For example the cytokine receptor ABD can be placed C-terminally on a polypeptide chain of the multispecific protein such that the positioning allows the cytokine receptor ABD to be topologically C-terminal within the multimeric protein). The NKp46 ABD and the CD16A ABD (e.g. a dimeric Fc domain) can be positioned adjacent to one another topologically in the protein, optionally connected to one another via a short domain linker. The NKp46 ABD, CD16A ABD and cytokine (or parts thereof) can thus be connected or positioned in series in the protein (or on polypeptide chain(s) thereof. Advantageously, the protein comprises a dimeric Fc domain (the Fc domain for example specified as consisting of two Fc monomers placed on separate polypeptide chains). Thus, in a multispecific protein the NKp46 ABD, the dimeric Fc domain and the cytokine are advantageously positioned adjacent to one another topologically (within the topology of the multispecific protein). In one embodiment, an NKp46-binding domain (or a part thereof, e.g. a VH or VL) and an Fc domain monomer (or CD16A-binding domain) are placed adjacent to one another on a same polypeptide chain(s), e.g. the adjacent NKp46-binding domain and the CD16A-binding domain can be separated by a domain linker but without any intervening protein domain (e.g. without an intervening domain that binds an antigen, and the cytokine moiety can be placed C-terminally thereto.

[0055] For example, in preferred multispecific proteins having particularly advantageous NK cell potentiation activity, the multispecific protein comprises a Fc domain dimer comprised of a first and second Fc domain monomer positioned on different polypeptide chains (that dimerize via CH3-CH3 association). The first Fc domain monomer can be fused at its C-terminus to an anti-NKp46 ABD (or portion thereof), and the anti-NKp46 ABD (or portion thereof) is in turn fused at its C-terminus to a cytokine. The portion of an anti-NKp46 ABD can be for example a ((VH or VL)-CH1) unit or ((VH or VL)-CL) unit where the ABD is a Fab. FIG. 2A to 2C, 2E, 2G to 2J, 2L, 2M show exemplary domain configurations where the anti-NKp46 ABD and the cytokine are topologically adjacent to one another with respect to N- and C-termini and are fused via one Fc domain monomer. FIGS. 2D, 2F, 2K and 2N show domain configurations where anti-NKp46 ABD and cytokine are each fused to the C-terminus of a different Fc domain monomer.

[0056] In any embodiment, the cytokine receptor-binding domain (cytokine receptorABD), the NKp46-binding domain (NKp46 ABD) and the CD16-binding domain (CD16 ABD) can be specified as being placed within the one or more polypeptide chains that make up the multispecific protein so that the domains are oriented in a configuration in which they are adjacent to one another or in series, from N to C terminal, on the multimeric (e.g. heteromultimeric) protein. Domains can be optionally separated by a domain linker e.g. a linking peptide of 5-20 residues that does not itself bind to a predetermined antigen.

[0057] In any embodiment, the multispecific protein can be specified as being configured e.g., through placement or configuration of the domain within a multispecific protein, such that the NKp46 ABD and the cytokine receptor ABD (e.g. the cytokine moiety) have the ability to assume a position where they are on the same side or face of the Fc domain dimer within the multispecific protein molecule, so as to enhance the ability to bind NKp46, CD16A and cytokine receptor in a membrane planar binding conformation. This configuration can be readily implemented in any in any of the heterodimeric, heterotrimeric or heterotetrameric proteins of the disclosure, for example by positioning the NKp46 ABD (or a part thereof, if the ABD is formed from association of two polypeptide chains) and the cytokine receptor ABD (or a part thereof, if the ABD is formed from association of two polypeptide chains) on the same polypeptide chain together with one of the Fc domain monomers.

[0058] The multispecific protein can have the formula (X₁)-L₁-(X₂)-L₂-(X₃), where one of X, and X₂ is an NKp46 ABD (e.g. a Fab, an scFv, a VHH) or a part thereof (e.g. the part may be an a VH or VL, a VH-CH1, VH-CL, VL-CL, VL-CH1) and the other is a Fc dimer or part thereof (e.g. an Fc monomer), and X₃ is a cytokine, wherein L₁ and L₂ are each an optional domain linker. The cytokine is positioned at the C-terminus of the polypeptide chain on which it (or a part thereof) is placed. L₁ connects X₁ and X₂ via a covalent bond (e.g. peptide bond). L₂ connects X₂ and X₃ via a covalent bond (e.g. peptide bond). X₁ to X₃ can optionally be specified as being arranged from the topological N- to C-terminus of the protein. The multispecific protein can further comprise an ABD that binds an antigen of interest, e.g. connected at the N-terminus of X, or positioned N-terminally within the topology of the protein.

[0059] As demonstrated herein, it will be appreciated that the different elements X₁, X₂ and X₃ (and further the ABD that binds an antigen of interest) can each be readily distributed onto two or more different polypeptide chains within the protein. In one embodiment, the multispecific protein can optionally be characterized as comprising a first polypeptide chain comprising the formula (X₁)-L₁-(X₂)-L₂-(X₃), where one of X₁ and X₂ is an NKp46 ABD or part thereof and the other is a Fc monomer, and X₃ is a cytokine or a part thereof, wherein L, and L₂ are each an optional domain linker. The cytokine can thus be positioned at the C-terminus of the polypeptide chain on which it (or a part thereof) is placed. The multispecific protein can further comprise an ABD that binds an antigen of interest, wherein the ABD (or a part thereof) is placed on the first polypeptide chain or on a separate polypeptide chain that associates (e.g. dimerizes) with first polypeptide chain (or with any other chain of the protein). The protein can then comprise one, two or more additional polypeptide chains that provide the complementary domains for the NKp46 ABD (when the NKp46 ABD is a part of an ABD,) the Fc monomer (so as to form an Fc dimer), the cytokine (where the cytokine is a part of a cytokine) and/or the ABD that binds an antigen of interest. Such additional polypeptide chains can thus associate (e.g. dimerize) with first or other polypeptide chain of the protein via non-covalent interactions and optionally further covalent interactions.

[0060] In another embodiment, the multispecific protein can optionally be characterized as comprising (i) a first polypeptide chain comprising the formula (X₁)-L₁-(X₂a), where X₁ is a first Fc monomer and X₂a is a first part of a NKp46 ABD, and (ii) a second polypeptide chain comprising the formula (X_{2b})-L₂-(X₃), wherein X_{2b} is a second part of a NKp46 ABD (e.g. a VH or VL, a VH-CH1, VH-CL, VL-CL, VL-CH1) that associates with X₂a to form an NKp46 ABD, and X₃ is a cytokine or a part thereof. L₁ and L₂ are each a domain linker. The multispecific protein can further comprise an ABD that binds an antigen of interest, wherein the ABD (or a part thereof) is placed on the first polypeptide chain (e.g. N-terminal to X₁) or on a separate polypeptide chain that associates (e.g. dimerizes) with first polypeptide chain (or with any other chain of the protein). The multispecific protein can further comprise an ABD that binds CD16A, optionally the ABD is a dimeric Fc domain; the ABD that binds CD16A (or a part thereof) ca be placed on the first polypeptide chain (e.g. N-terminal to X₁), and when the ABD is a dimeric Fc domain one of the Fc monomers can be placed on the first polypeptide chain and the second Fc monomer can be placed on a separate polypeptide chain that associates (e.g. dimerizes) with first polypeptide chain.

[0061] In one embodiment, the NKp46-binding domain binds NKp46 such that the NKp46 binding domain of the multispecific protein, when bound to NKp46 at the surface of a cell, is about 70 Angstroms from the cell membrane. In one such embodiment, exemplified by the protein incorporating the CDRs of the NKp46-1 VH/VL pair, the NKp46-binding domain binds to the D1/D2 junction of the NKp46 polypeptide. Optionality, the NKp46-binding domain exhibits decreased binding to the NKp46 mutant 2 (having a mutation at residues K41, E42 and E119) and mutant Supp7 (having a mutation at residues Y121 and Y194) compared to the wild-type NKp46 polypeptide. In one embodiment, an NKp46 antigen binding domain can be characterized as displaying decreased binding to a NKp46 mutant polypeptide having one, two, three, four or five of the mutations: K41, E42, E119, Y121 and Y194 compared to a wild-type NKp46 polypeptide.

[0062] In one embodiment, the NKp46-binding domain binds NKp46 such that the NKp46 binding domain of the multispecific protein, when bound to NKp46 at the surface of a cell, is less than about 70 Angstroms, optionally less than about 50 Angstroms, from the cell membrane. In one such embodiment, exemplified by the protein incorporating the CDRs of the NKp46-4 VH/VL pair, the NKp46-binding domain binds to the D1 domain of the NKp46 polypeptide which is positioned more proximal to the NK cell membrane compared to the D1/D2 junction. Optionality, the NKp46-binding domain exhibits decreased binding to the NKp46 mutant 6 (having a mutation at residues R101 and V102) and mutant Supp6 (having a mutation at residues E104 and L₁₀₅) compared to the wild-type NKp46 polypeptide. In one embodiment, an NKp46 antigen binding domain can be characterized as displaying decreased binding to a NKp46 mutant polypeptide having one, two, three or four of the mutations: R101, V102, E104 and L₁₀₅ compared to a wild-type NKp46 polypeptide. In one embodiment, the multispecific protein comprises a domain linker of at least 10 amino acid residues between an NKp46 binding domain that binds within the D1 domain and the cytokine.

[0063] In another embodiment, exemplified by the protein incorporating the CDRs of the NKp46-3 VH/VL pair, the NKp46-binding domain binds to the D2 domain of the NKp46 polypeptide which is positioned more proximal to the NK cell membrane compared to the D1/D2 junction. Optionality, the NKp46-binding domain exhibits decreased binding to the NKp46 mutant 19 (having a mutation at residues 1135, and S136) and mutant Supp8 (having a mutation at residues P132 and E133) compared to the wild-type NKp46 polypeptide. In one embodiment, an NKp46 antigen binding domain can be characterized as displaying decreased binding to a NKp46 mutant polypeptide having one, two, three or four of the mutations: 1135, S136, P132 and E133 compared to a wild-type NKp46 polypeptide. In one embodiment, the multispecific protein comprises a domain linker of at least 10 amino acid residues between an NKp46 binding domain that binds within the D2 domain and the cytokine.

[0064] In any embodiment herein, the multispecific protein can be characterized by having only one cytokine receptor binding domain.

[0065] In any embodiment herein, the multispecific protein can be characterized by having only one NKp46 binding domain.

[0066] Certain exemplary heteromultimeric proteins can comprise the following general domain organization of structure 1a or 1b, where the CD16 ADC (e.g. Fc domain) and NKp46 ABD are immediately adjacent to other another within the protein, and NKp46 ABD is immediately adjacent to the cytokine receptor ABD (embodied as a cytokine (Cyt)), and wherein the NKp46 ABD is interposed between the CD16 ABD and the Cyt:

(CD16ABD)(NKp46ABD)(Cyt) (Structure 1a)

or

(Fc domain dimer)(NKp46ABD)(Cyt) (Structure 1b)
[0067] wherein the NKp46 ABD and the CD16ABD (e.g. Fc domain dimer) are connected by a domain linker and the NKp46 ABD and Cyt are connected by a domain linker.

[0068] The NKp46 ABD can conveniently be a Fab, a single domain antibody or an scFv. The CD16 ABD can be an Fc domain, a Fc domain dimer, an Fc domain of human IgG1 subtype. The Cyt can be for example an IL-2, IL-15, IL-21, IL-7, IL-27, IL-12, IL-18, IFN-α or IFN-β) polypeptide, optionally wherein the polypeptide is a variant cytokine that differs by at least one residue from the wild-type human cytokine counterpart.

[0069] The protein of structure 1a can comprise an ABD that binds an antigen of interest on a target cell (Antigen ABD) placed terminal to (e.g. N-terminal to) the CD16 ABD (e.g. Fc domain dimer), as in a heteromultimeric protein having the structure 1c or 1d below:

(Antigen ABD)ₙ(CD16ABD)(NKp46ABD)(Cyt) (Structure 1c)

or

(Antigen ABD)ₙ(Fc domain dimer)(NKp46ABD)(Cyt) (Structure 1d)
[0070] wherein “n” is 1 or 2, and the Antigen ABD and the CD16 ABD (e.g. Fc domain dimer) are connected by a linker, optionally wherein the linker is an immunoglobulin hinge polypeptide, wherein the CD16 ABD and the NKp46 ABD are connected by a linker and the NKp46 ABD and Cyt are connected by a linker. Where “n” is 2, Structure 1d can also be represented as Structure 1e:

[0071] (Antigen ABD)

(Fc domain dimer)(NKp46ABD)(Cyt) (Structure 1e)

[0072] (Antigen ABD)

[0073] In any embodiment, the multispecific protein can be characterized as binding monovalently to each of the NKp46 polypeptide and the cytokine receptor, and being capable of directing an NKp46-expressing NK cell to lyse a target cell expressing the antigen of interest. Advantageously, in on embodiment, the presence of NK cells and target cells, the multi-specific protein can bind (i) to antigen of interest on target cells, (ii) to NKp46 on NK cells, (iii) to CD16A on NK cells and (iv) to the cytokine receptor on NK cells (e.g. CD122, IL-21R, IL-7Rα, IL-27Rα, IL-12R, IL-18R, IFNAR), and when bound to such proteins on the target cell and NK cells, can induce signaling in and/or activation of the NK cells through NKp46 (the protein acts as an NKp46 agonist) and the cytokine receptor (the protein acts as a cytokine receptor agonist), thereby promoting activation of NK cells and/or lysis of target cells, notably via the activating signal transmitted by NKp46.

[0074] In one embodiment, in the presence of NK cells and target cells, the multi-specific protein can induce the cytotoxicity of, cytokine receptor pathway signaling in (as assessed by STAT signaling) and/or activation of the NK cells, wherein such cytotoxicity, activation and/or signaling is greater (e.g. at least 100-fold or 1000-fold lower EC₅₀ value) than that observed when the multi-specific protein is contacted with NK cells in the absence of target cells.

[0075] Optionally, the multi-specific protein can bind NKp46 and CD122 on NK cells (e.g. the protein comprises an IL2 or IL15 moiety, optionally an modified or variant IL2 or IL15 with decreased binding to CD25), and, when bound to both NKp46 and CD122, can induce signaling in the NK cells through both NKp46 and CD122. Optionally, the multi-specific protein can bind NKp46, CD16A and CD122 on NK cells, and, when bound to NKp46, CD16 and CD122, can induce signaling in the NK cells through NKp46, CD16A and CD122. Cytokine receptor signaling can be assessed by measuring STAT5, optionally wherein the observed signaling is greater than that observed with a comparator protein in which the NKp46 binding domain is replaced with a control ABD (e.g. that does not bind to any protein present in the assay system).

[0076] Optionally, the multi-specific protein can bind NKp46 and IL-21R on NK cells (e.g. the protein comprises an IL21 moiety), and, when bound to both NKp46 and IL-21R, can induce signaling in the NK cells through both NKp46 and IL-21R. Optionally, the multi-specific protein can bind NKp46, CD16A and IL-21R on NK cells, and, when bound to NKp46, CD16A and IL-21R, can induce signaling in the NK cells through NKp46, CD16A and IL-21R. Optionally, cytokine signaling is assessed by measuring STAT3, wherein the observed signaling is greater than that observed with a comparator protein in which the NKp46 binding domain is replaced with a control ABD (e.g. that does not bind to any protein present in the assay system).

[0077] Optionally, the multi-specific protein can bind NKp46 and IL-18R on NK cells (e.g. the protein comprises an IL18 moiety), and, when bound to both NKp46 and IL-18R (IL-18Rα and/or IL-18RP), can induce signaling in the NK cells through both NKp46 and IL-18R. Optionally, the multi-specific protein can bind NKp46, CD16A and IL-18R on NK cells, and, when bound to NKp46, CD16A and IL-18R, can induce signaling in the NK cells through NKp46, CD16A and IL-18R. Optionally, cytokine signaling signaling is assessed by measuring STAT3, wherein the observed signaling is greater than that observed with a comparator protein in which the NKp46 binding domain is replaced with a control ABD (e.g. that does not bind to any protein present in the assay system).

[0078] Optionally, the multi-specific protein can bind NKp46 and IL-7R (e.g. IL-7Rα (CD127) and/or CD132) on NK cells (e.g. the protein comprises an IL-7 moiety), and, when bound to both NKp46 and IL-7R, can induce signaling in the NK cells through both NKp46 and IL-7Rα. Optionally, the multi-specific protein can bind NKp46, CD16A and IL-7R on NK cells, and, when bound to NKp46, CD16A and IL-7R, can induce signaling in the NK cells through NKp46, CD16A and IL-7R. Optionally, cytokine signaling signaling is assessed by measuring STAT5, wherein the observed signaling is greater than that observed with a comparator protein in which the NKp46 binding domain is replaced with a control ABD (e.g. that does not bind to any protein present in the assay system).

[0079] Optionally, the multi-specific protein can bind NKp46 and IL-27R (e.g. IL-27Rα and/or GP130) on NK cells (e.g. the protein comprises an IL-27 moiety), and, when bound to both NKp46 and IL-27R, can induce signaling in the NK cells through both NKp46 and IL-27R. Optionally, the multi-specific protein can bind NKp46, CD16A and IL-27R on NK cells, and, when bound to NKp46, CD16A and IL-27R, can induce signaling in the NK cells through NKp46, CD16A and IL-27R. Signalling via NKp46 and/or CD16A can be assessed by a marker of NK cell activation (e.g. a marker used in the Examples, CD69 expression, etc.). Optionally, cytokine signaling signaling is assessed by measuring STAT1, wherein the observed signaling is greater than that observed with a comparator protein in which the NKp46 binding domain is replaced with a control ABD (e.g. that does not bind to any protein present in the assay system).

[0080] Optionally, the multi-specific protein can bind NKp46 and IL-12R (e.g., IL-12Rβ1 and/or IL-12Rβ2) on NK cells (e.g. the protein comprises an IL-27 moiety), and, when bound to both NKp46 and IL-12R, can induce signaling in the NK cells through both NKp46 and IL-12R. Optionally, the multi-specific protein can bind NKp46, CD16A and IL-12R on NK cells, and, when bound to NKp46, CD16A and IL-12R, can induce signaling in the NK cells through NKp46, CD16A and IL-12R. Optionally, cytokine signaling signaling is assessed by measuring STAT4, wherein the observed signaling is greater than that observed with a comparator protein in which the NKp46 binding domain is replaced with a control ABD (e.g. that does not bind to any protein present in the assay system).

[0081] Optionally, the multi-specific protein can bind NKp46 and IFNAR on NK cells, and, when bound to both NKp46 and IFNAR (IFNAR1 and/or IFNAR2), can induce signaling in the NK cells through both NKp46 and IFNAR. For example, the multi-specific protein can comprise an IFN-α or IFN-β moiety) Optionally, the multi-specific protein can bind NKp46, CD16A and IFNAR on NK cells, and, when bound to both NKp46, CD16A and IFNAR, can induce signaling in the NK cells through NKp46, CD16A and IFNAR. Optionally, cytokine signaling signaling is assessed by measuring STAT (e.g., STAT1, STAT2 or IFN regulatory factor (IRF)-9), wherein the observed signaling is greater than that observed with a comparator protein in which the NKp46 binding domain is replaced with a control ABD (e.g. that does not bind to any protein present in the assay system).

[0082] Signalling via NKp46 and/or CD16A can be assessed by a marker of NK cell activation (e.g. a marker used in the Examples, CD69 expression, etc.).

[0083] In some embodiment, the multispecific protein comprises at least a portion of a human Fc domain, e.g. a portion sufficient such that the Fc domain is bound by a human FcRn polypeptide, optionally wherein said FcRn binding affinity as assessed by SPR is within 1-log of that of a conventional human IgG1 antibody.

[0084] The multispecific proteins advantageously are able to potently mobilize both CD16+ and CD16− NK cells (all NK cells are NKp46+).

[0085] In one aspect, the multispecific protein comprises two or more polypeptide chains, i.e. it comprises a multi-chain protein (also referred as a multimeric protein). For example, the multispecific protein or multi-chain protein can be a hetero-dimer, hetero-trimer or hetero-tetramer or may comprise more than four polypeptide chains.

[0086] Any antigen binding domain (e.g. the ABD that binds the antigen of interest (e.g. tumor antigen), NKp46, or cytokine receptor) can be contained entirely on a single polypeptide chain, for example as an scFv or single antigen binding domain such as a sdAb or nanobody, a V_{NAR} or VHH domain or a DARPin® protein module). Alternatively, an antigen binding domain can be made of two or more protein domains placed on separate polypeptide chains, such that the antigen binding domain binds its target when two or more complementary protein domains (e.g. as VH/VL pairs) are associated in the multimeric protein.

[0087] The multispecific protein can bind to the antigen of interest (e.g. cancer antigen) in monovalent or multivalent manner. Where the multispecific protein binds the antigen of interest monovalently, binds NK46 monovalently and binds the cytokine receptor monovalently, the multispecific protein can be indicated as having a 1:1:1 configuration. Where the multispecific protein binds the antigen of interest bivalently, binds NK46 monovalently and binds the cytokine receptor monovalently, the multispecific protein can be indicated as having a 2:1:1 configuration. Representative examples of different 1:1:1 and 2:1:1 configurations are shown in FIG. 2.

[0088] In any aspect, the multispecific protein can be characterized as having a structure in which the freedom of motion (intrachain domain motion) or flexibility of one or more antigen binding domains (ABDs) is increased, e.g. compared to the ABDs of a conventional human IgG antibody. In one embodiment, provided is a multispecific protein comprising a structure that permits the antigen binding site of the first antigen binding domain and the antigen binding site of the second antigen binding domain to be separated by a distance that results in enhanced function, e.g., the ability of the multispecific protein to induce NKp46 signaling and lysis of target cells, e.g., optionally a distance of less than 80 ångström (Å). Multispecific proteins wherein the ABDs possess greater flexibility and/or are separated by an optimized distance may enhance the formation of a lytic NKp46-target synapse, thereby potentiating NKp46-mediated signaling. Such flexibility and/or domain of motion can be readily achieved through the use of linkers (e.g. flexible amino acid based linkers) that separate the NKp46 binding domain from the Fc domain (e.g. the Fc domain dimer, or more generally the rest of the multispecific protein).

[0089] In any aspect, the multispecific protein can be characterized as having increased freedom of motion of the antigen binding domains (e.g. compared to the ABDs of a conventional human IgG antibody, e.g., a human IgG1 antibody). One example of such a protein is a multimeric Fc domain-containing protein (e.g. a heterodimer or heterotrimer) in which an antigen binding domain (e.g., the ABD that binds NKp46) is linked or fused to an Fc domain via a flexible linker. The linker can provide flexibility or freedom of motion of one or more ABDs by conferring the ability to bend thereby potentially decreasing the angle between the ABD and the Fc domain (or between the two ABDs) at the linker. Optionally, both antigen binding domains (and optionally more if additional ABDs are present in the multispecific protein) are linked or fused to the Fc domain via a linker, typically a flexible peptide linker. Optionally, the protein with increased freedom of motion permits the protein to adopt a conformation in which the distance between the NKp46 binding site and the antigen of interest binding site is less that than observed in proteins in which both binding domains were Fabs, or less than in full length antibodies.

[0090] An ABD can be connected to an Fc domain monomer (or CH2 or CH3 domain thereof) via a domain linker. The linker can be a polypeptide linker, for example peptide linkers comprising a length of at least 5 residues, at least 10 residues, at least 15 residues, at least 20 residues, or more. In other embodiments, the linkers comprises a length of between 2-4 residues, between 2-5 residues, between 2-6 residues, between 2-8 residues, between 5-10 residues, between 2-15 residues, between 4-15 residues, between 3-15 residues, between 5-15 residues, between 10-15 residues, between 4-20 residues, between 5-20 residues, between 2-20 residues, between 10-30 residues, or between 10-50 residues. Optionally a linker comprises an amino acid sequence derived from an antibody constant region, e.g., an amino acid sequence from a CH1 or CK domain (e.g an an N-terminal sequence from a CH1 or CK domain) or from a hinge. Optionally a linker comprises the amino acid sequence RTVA. Optionally a linker is a flexible linker predominantly or exclusively comprised of glycine and/or serine residues, e.g., comprising an amino acid sequence (G×S)ₙ where G is 1, 2, 3 or 4 and n is an integer from 1-10, from 1-6 or from 1-4. Optionally the linker comprises 1-20 or 1-10 further amino acid residues.

[0091] In one embodiment, provided is a heterotrimer having a polypeptide chain 1, 2 and 3:

[chemical structure]

[0092] wherein:
[0093] Vₐ₋₁, V_{b-1}, Vₐ₋₂ and V_{b-2} are each a V_{H} domain or a VL domain, wherein Vₐ₋₁ and V_{b-1} bind an antigen of interest (optionally wherein one of Vₐ₋₁ and V_{b-1} is a V_{H} and the other is a V_{L} and wherein Vₐ₋₁ and V_{b-1} form a first antigen binding domain (ABD) that binds an antigen of interest), wherein one of Vₐ₋₂ and V_{b-2} is a V_{H} and the other is a V_{L} and wherein Vₐ₋₂ and V_{b-2} form a second ABD that binds NKp46;
[0094] CH1 is a human immunoglobulin CH1 domain and CL is a human light chain constant domain;
[0095] one of (CH1 or CL)ₐ and (CH1 or CL)_{c} is a CH1 and the other is a CL such that a (CH1/CL) pair is formed;
[0096] one of (CH1 or CL)_{b} and (CH1 or CL)_{d} is a CH1 and the other is a CL such that a (CH1/CL) pair is formed;
[0097] Hinge is an immunoglobulin hinge region or portion thereof;
[0098] L₁ and L₂ are each an amino acid domain linker, wherein L₁ and L₂ can be different or the same;
[0099] CH2 and CH3 are human immunoglobulin CH2 and CH3 domains, respectively; and
[0100] Cyt is a cytokine polypeptide or portion thereof that binds to a cytokine receptor present on NK cells, optionally wherein Cyt is a wild-type or variant human IL-2, IL-15, IL-21, IL-7, IL-27, IL-12, IL-18, IFN-α or IFN-β polypeptide. In another embodiment that can be made using the same domains and domain linkers, provided is a heterotrimer having a polypeptide chain 1, 2 and 3:

[chemical structure]

[0101] In one embodiment, provided is a heterodimer having a polypeptide chain 1 and 2:

[chemical structure]

[0102] wherein:
[0103] Vₐ₋₁, V_{b-1}, Vₐ₋₂ and V_{b-2} are each a V_{H} domain or a V_{L} domain, wherein Vₐ₋₁ and V_{b-1} bind an antigen of interest (optionally wherein one of Vₐ₋₁ and V_{b-1} is a V_{H} and the other is a V_{L} and wherein Vₐ₋₁ and V_{b-1} form a first antigen binding domain (ABD) that binds an antigen of interest), wherein one of Vₐ₋₂ and V_{b-2} is a V_{H} and the other is a V_{L} and wherein Vₐ₋₂ and V_{b-2} form a second ABD that binds NKp46;
[0104] CH1 is a human immunoglobulin CH1 domain and CL is a light chain constant domain; one of (CH1 or CL)ₐ and (CH1 or CL)_{b} is a CH1 and the other is a CL such that a (CH1/CL) pair is formed;
[0105] Hinge is an immunoglobulin hinge region or portion thereof;
[0106] L₁, L₂ and L₃ are each an amino acid domain linker, wherein L₁, L₂ and L₃ can be different or the same;
[0107] CH2 and CH3 are human immunoglobulin CH2 and CH3 domains, respectively; and
[0108] Cyt is a cytokine polypeptide or portion thereof that binds to a cytokine receptor present on NK cells, optionally wherein Cyt is a wild-type or variant human IL-2, IL-15, IL-21, IL-7, IL-27, IL-12, IL-18, IFN-α or IFN-β polypeptide.

[0109] The disclosure further provides further heterodimer, heterotrimer and heterotetramer multispecific molecules and domain arrangements as further described herein. In one aspect, a multispecific protein is a heteromultimer, heterodimer, heterotrimer, heterotetramer having a structure or domain arrangement as shown in any of FIGS. 2A to 2N.

[0110] In one aspect of any of the embodiments described herein, an ABD (e.g., the anti-NKp46 ABD, the ABD that binds the antigen of interest or tumor antigen) can be specified as comprising an immunoglobulin heavy chain variable domain (VH) and an immunoglobulin light chain variable domain (VL), wherein each VH and VL comprises three complementary determining regions (CDR-1 to CDR-3). In one aspect of any of the embodiments described herein, a VH can be specified as having the amino acid sequence of a human VH domain. In one aspect of any of the embodiments described herein, a VL can be specified as having the amino acid sequence of a human VL domain.

[0111] In one aspect of any of the embodiments, a VH region comprises an amino acid sequence having at least about 80%, 85%, 90%, 95%, 97%, 98% or 99% identity, to the amino acid sequence encoded by a gene of a human V gene group selected from the group consisting of IGHV1-18, IGHV1-2, IGHV1-24, IGHV1-3, IGHV1-45, IGHV1-46, IGHV1-58, IGHV1-69, IGHV1-69-2, IGHV1-69D, IGHV1-8, IGHV2-26, IGHV2-5, IGHV2-70, IGHV2-70D, IGHV3-11, IGHV3-13, IGHV3-15, IGHV3-20, IGHV3-21, IGHV3-23, IGHV3-23D, IGHV3-30, IGHV3-30-3, IGHV3-30-5, IGHV3-33, IGHV3-43, IGHV3-43D, IGHV3-48, IGHV3-49, IGHV3-53, IGHV3-62, IGHV3-64, IGHV3-64D, IGHV3-66, IGHV3-7, IGHV3-72, IGHV3-73, IGHV3-74, IGHV3-9, IGHV3-NL1, IGHV4-28, IGHV4-30-2, IGHV4-30-4, IGHV4-31, IGHV4-34, IGHV4-38-2, IGHV4-39, IGHV4-4, IGHV4-59, IGHV4-61, IGHV5-10-1, IGHV5-51, IGHV6-1, IGHV7-4-1, IGHV1-38-4, IGHV1/OR15-1, IGHV1/OR15-5, IGHV1/OR15-9, IGHV1/OR21-1, IGHV2-70, IGHV2/OR16-5, IGHV3-16, IGHV3-20, IGHV3-25, IGHV3-35, IGHV3-38, IGHV3-38-3, IGHV3/OR15-7, IGHV3/OR16-10, IGHV3/OR16-12, IGHV3/OR16-13, IGHV3/OR16-17, IGHV3/OR16-20, IGHV3/OR16-6, IGHV3/OR16-8, IGHV3/OR16-9, IGHV4-61, IGHV4/OR15-8, IGHV7-81, and IGHV8-51-1. Optionally, a VH region comprises a VH comprising an amino acid sequence (e.g. CDR(s) and/or a human framework region(s), for example according to Kabat numbering) from said gene. In one aspect of any of the embodiments, a VH region comprises an amino acid sequence having at least about 80%, 85%, 90%, 95%, 97%, 98% or 99% identity, to the amino acid sequence of SEQ ID NOS: 236-313.

[0112] In one aspect of any of the embodiments, a VL region comprises an amino acid sequence having at least about 80%, 85%, 90%, 95%, 97%, 98% or 99% identity, to the amino acid sequence encoded by a gene of a human V gene group selected from the group consisting of IGKV1-12, IGKV1-13, IGKV1-16, IGKV1-17, IGKV1-27, IGKV1-33, IGKV1-39, IGKV1-5, IGKV1-6, IGKV1-8, IGKV1-9, IGKV1-NL1, IGKV1D-12, IGKV1D-13, IGKV1D-16, IGKV1D-17, IGKV1D-33, IGKV1D-43, IGKV1D-8, IGKV2-24, IGKV2-28, IGKV2-29, IGKV2-30, IGKV2-40, IGKV2D-26, IGKV2D-28, IGKV2D-29, IGKV2D-30, IGKV2D-40, IGKV3-11, IGKV3-15, IGKV3-20, IGKV3D-11, IGKV3D-15, IGKV3D-20, IGKV3D-7, IGKV4-1, IGKV5-2, IGKV6-21, IGKV6D-21, IGKV1-37, IGKV1/OR2-0, IGKV1/OR2-108, IGKV1D-37, IGKV1D-42, IGKV2D-24, IGKV3-7, IGKV3/OR2-268, IGKV3D-20, IGKV6D-41, IGLV1-36, IGLV1-40, IGLV1-44, IGLV1-47, IGLV1-51, IGLV10-54, IGLV2-11, IGLV2-14, IGLV2-18, IGLV2-23, IGLV2-8, IGLV3-1, IGLV3-10, IGLV3-12, IGLV3-16, IGLV3-19, IGLV3-21, IGLV3-22, IGLV3-25, IGLV3-27, IGLV3-9, IGLV4-3, IGLV4-60, IGLV4-69, IGLV5-37, IGLV5-39, IGLV5-45, IGLV5-52, IGLV6-57, IGLV7-43, IGLV7-46, IGLV8-61, IGLV9-49, IGLV1-41, IGLV1-50, IGLV11-55, IGLV2-33, IGLV3-32, IGLV5-48 and IGLV8/OR8-1. Optionally, a VL region comprises a VL comprising an amino acid sequence (e.g. CDR(s) and/or a human framework region(s), for example according to Kabat numbering) from said gene. In one aspect of any of the embodiments, a VL region comprises an amino acid sequence having at least about 80%, 85%, 90%, 95%, 97%, 98% or 99% identity, to the amino acid sequence of SEQ ID NOS: 314-403.

[0113] In one aspect of any of the embodiments described herein, an ABD comprises an scFv or Fab, wherein the scFv comprises a VH comprising an amino acid sequence at least 90% identical to a sequence selected from SEQ ID NOS: 3, 5, 7, 9, 11, 13, 112, 113, 115, 116, 117, 119, 120, 121, 123, 124, 125, 127, 128, 129, 132, 134, 136, 138, 140, 142, 144, 146, 148, 150, 152, 154 and any of 236-313, a domain linker, and a VL comprising an amino acid sequence at least 90% identical to a sequence selected from SEQ ID NOS: 4, 6, 8, 10, 12, 14, 114, 118, 122, 126, 130, 133, 135, 137, 139, 141, 143, 145, 147, 149, 151, 153, 155 and any of 314-403; and wherein the Fab comprises one VH comprising an amino acid sequence at least 90% identical to a selected from SEQ ID NOS: 3, 5, 7, 9, 11, 13, 112, 113, 115, 116, 117, 119, 120, 121, 123, 124, 125, 127, 128, 129, 132, 134, 136, 138, 140, 142, 144, 146, 148, 150, 152, 154 and any of 236-313, one VL comprising an amino acid sequence at least 90% identical to a sequence selected from SEQ ID NOS: 4, 6, 8, 10, 12, 14, 114, 118, 122, 126, 130, 133, 135, 137,139, 141, 143, 145, 147,149, 151, 153, 155 and any of 314-403, one human CH1 domain comprising an amino acid sequence at least 90% identical to SEQ ID NO: 156 and one human CL domain comprising an amino acid sequence at least 90% identical to SEQ ID NO: 159, wherein the VH is fused to one of the CH1 or CL domains, and the VL is fused to the other of the CH1 or CL domains.

[0114] In one aspect of any of the embodiments described herein, an IL2 comprises an amino acid sequence having at least about 80%, 85%, 90%, 95%, 97%, 98% or 99% identity to the IL-2 polypeptide of any of SEQ ID NOS: 404-417, or to a contiguous sequence of at least 40, 50, 60, 70, 80 or 100 amino acid residues thereof. Optionally the IL2 further comprises 2, 3, 4, 5 or more amino acid substitutions that reduce binding to CD25, e.g. substitutions at any of the residues disclosed herein.

[0115] In one aspect of any of the embodiments described herein, an IL15 comprises an amino acid sequence having at least about 80%, 85%, 90%, 95%, 97%, 98% or 99% identity to the IL-15 polypeptide of any of SEQ ID NO: 418, or to a contiguous sequence of at least 40, 50, 60, 70, 80 or 100 amino acid residues thereof.

[0116] In one aspect of any of the embodiments described herein, an IL12 comprises an amino acid sequence having at least about 80%, 85%, 90%, 95%, 97%, 98% or 99% identity to the IL-12 polypeptide of any of SEQ ID NOS: 438 and/or 439, or to a contiguous sequence of at least 40, 50, 60, 70, 80 or 100 amino acid residues thereof.

[0117] In one aspect of any of the embodiments described herein, an IL7 comprises an amino acid sequence having at least about 80%, 85%, 90%, 95%, 97%, 98% or 99% identity to the IL-7 polypeptide of any of SEQ ID NO: 435, or to a contiguous sequence of at least 40, 50, 60, 70, 80 or 100 amino acid residues thereof.

[0118] In one aspect of any of the embodiments described herein, an IL27 comprises an amino acid sequence having at least about 80%, 85%, 90%, 95%, 97%, 98% or 99% identity to the IL-21 polypeptide of any of SEQ ID NOS: 436 and/or 437, or to a contiguous sequence of at least 40, 50, 60, 70, 80 or 100 amino acid residues thereof.

[0119] In one aspect of any of the embodiments described herein, an IL21 comprises an amino acid sequence having at least about 80%, 85%, 90%, 95%, 97%, 98% or 99% identity to the IL-27 polypeptide of any of SEQ ID NOS: 420 or 421, or to a contiguous sequence of at least 40, 50, 60, 70, 80 or 100 amino acid residues thereof.

[0120] In one aspect of any of the embodiments described herein, an IL18 comprises an amino acid sequence having at least about 80%, 85%, 90%, 95%, 97%, 98% or 99% identity to the IL-18 polypeptide of any of SEQ ID NO: 422, or to a contiguous sequence of at least 40, 50, 60, 70, 80 or 100 amino acid residues thereof.

[0121] In one aspect of any of the embodiments described herein, an IFN-α comprises an amino acid sequence having at least about 80%, 85%, 90%, 95%, 97%, 98% or 99% identity to the IFN-α polypeptide of any of SEQ ID NOS: 423-433, or to a contiguous sequence of at least 40, 50, 60, 70, 80 or 100 amino acid residues thereof.

[0122] In one aspect of any of the embodiments described herein, an IFN-β comprises an amino acid sequence having at least about 80%, 85%, 90%, 95%, 97%, 98% or 99% identity to the IFN-α polypeptide of any of SEQ ID NOS: 434, or to a contiguous sequence of at least 40, 50, 60, 70, 80 or 100 amino acid residues thereof.

[0123] In one aspect of any of the embodiments described herein, an Fc domain comprises an amino acid sequence having at least about 80%, 85%, 90%, 95%, 97%, 98% or 99% identity to the Fc polypeptide of any of SEQ ID NOS: 160-165, or to a contiguous sequence of at least 40, 50, 60, 70, 80 or 100 amino acid residues thereof.

[0124] In one aspect of any of the embodiments described herein, a CH1, CH2 and CH3 domain respectively comprise an amino acid sequence having at least about 80%, 85%, 90%, 95%, 97%, 98% or 99% identity to the CH1 polypeptide of SEQ ID NO: 156, 157 or 158, or to a contiguous sequence of at least 40, 50, 60, 70, 80 or 100 amino acid residues thereof.

[0125] In one aspect of any of the embodiments described herein, a CK or CL domain comprises an amino acid sequence having at least about 80%, 85%, 90%, 95%, 97%, 98% or 99% identity to the CK polypeptide of any of SEQ ID NO: 159, or to a contiguous sequence of at least 40, 50, 60, 70, 80 or 100 amino acid residues thereof.

[0126] In one aspect of any of the embodiments described herein, a hinge domain comprises an amino acid sequence having at least about 80%, 85%, 90%, 95%, 97%, 98% or 99% identity to the CK polypeptide of any of SEQ ID NO: 166-170.

[0127] In one aspect of any of the embodiments described herein, a multispecific protein comprises:
[0128] (a) an ABD that binds to the antigen of interest, wherein the ABD comprises a VH comprising an amino acid sequence at least 70%, 80% or 90% identical to a sequence selected from SEQ ID NOS: 132, 134, 136, 138, 140, 142, 144, 146, 148, 150, 152, 154 and any of 236-313, a domain linker, and a VL comprising an amino acid sequence at least 90% identical to a sequence selected from SEQ ID NOS: 133, 135, 137, 139, 141, 143, 145, 147, 149, 151, 153, 155 and any of 314-403; and
[0129] (b) an ABD that binds to a human NKp46 polypeptide, wherein the ABD comprises a VH comprising an amino acid sequence at least 70%, 80% or 90% identical to a sequence selected from SEQ ID NOS: 3, 5, 7, 9, 11, 13, 112, 113, 115, 116, 117, 119, 120, 121, 123, 124, 125, 127, 128, 129 and any of 236-313, a domain linker, and a VL comprising an amino acid sequence at least 90% identical to a sequence selected from SEQ ID NOS: 4, 6, 8, 10, 12, 14, 114, 118, 122, 126, 130 and any of 314-403;
[0130] (c) a Fc domain dimer comprising two Fc domain monomer polypeptides, wherein each Fc domain monomer polypeptide comprises an amino acid sequence at least 70%, 80% or 90% identical to a sequence selected from SEQ ID NOS: 160-165; and
[0131] (d) a cytokine polypeptide comprising an amino acid sequence at least 70%, 80% or 90% identical to a sequence selected from SEQ ID NOS: 404-436, or to a contiguous sequence of at least 40, 50, 60, 70, 80 or 100 amino acid residues thereof, fused, via a domain linker, to the C-terminus of one of the polypeptide chains of the multispecific protein.

[0132] In one aspect of any of the embodiments described herein, a hinge domain comprises an amino acid sequence having at least about 80%, 85%, 90%, 95%, 97%, 98% or 99% identity to the CK polypeptide of any of SEQ ID NO: 166-170.

[0133] In one aspect of any of the embodiments described herein, a multispecific protein comprises:
[0134] (a) an ABD that binds to the antigen of interest, wherein the ABD comprises an scFv or Fab,
   [0135] a. wherein the scFv comprises a VH comprising an amino acid sequence at least 90% identical to a sequence selected from SEQ ID NOS: 132, 134, 136, 138, 140, 142, 144, 146, 148, 150, 152, 154 and any of 236-313, a domain linker, and a VL comprising an amino acid sequence at least 90% identical to a sequence selected from SEQ ID NOS: 133, 135, 137, 139, 141, 143, 145, 147, 149, 151, 153, 155 and any of 314-403; and
   [0136] b. wherein the Fab comprises one VH comprising an amino acid sequence at least 90% identical to a selected from SEQ ID NOS: 132, 134, 136, 138, 140, 142, 144, 146, 148, 150, 152, 154 and any of 236-313, one VL comprising an amino acid sequence at least 90% identical to a sequence selected from SEQ ID NOS: 133, 135, 137, 139, 141, 143, 145, 147, 149, 151, 153, 155 and any of 314-403, one human CH1 domain comprising an amino acid sequence at least 90% identical to SEQ ID NO: 156 and one human CL domain comprising an amino acid sequence at least 90% identical to SEQ ID NO: 159, wherein the VH is fused to one of the CH1 or CL domains, and the VL is fused to the other of the CH1 or CL domains,
[0137] (b) an ABD that binds to a human NKp46 polypeptide, wherein the ABD comprises an scFv or Fab,
   [0138] a. wherein the scFv comprises a VH comprising an amino acid sequence at least 90% identical to a sequence selected from SEQ ID NOS: 3, 5, 7, 9, 11, 13, 112, 113, 115, 116, 117, 119, 120, 121, 123, 124, 125, 127, 128, 129 and any of 236-313, a domain linker, and a VL comprising an amino acid sequence at least 90% identical to a sequence selected from SEQ ID NOS: 4, 6, 8, 10, 12, 14, 114, 118, 122, 126, 130 and any of 314-403; and
   [0139] b. wherein the Fab comprises one VH comprising an amino acid sequence at least 90% identical to a selected from SEQ ID NOS: 3, 5, 7, 9, 11, 13, 112, 113, 115, 116, 117, 119, 120, 121, 123, 124, 125, 127, 128, 129 and any of 236-313, one VL comprising an amino acid sequence at least 90% identical to a sequence selected from SEQ ID NOS: 4, 6, 8, 10, 12, 14, 114, 118, 122, 126, 130 and any of 314-403, one human CH1 domain comprising an amino acid sequence at least 90% identical to SEQ ID NO: 156 and one human CL domain comprising an amino acid sequence at least 90% identical to SEQ ID NO: 159, wherein the VH is fused to one of the CH1 or CL domains, and the VL is fused to the other of the CH1 or CL domains,
[0140] (c) a Fc domain dimer comprising two Fc domain monomer polypeptides, wherein each Fc domain monomer polypeptide comprises an amino acid sequence at least 90% identical to a sequence selected from SEQ ID NOS: 160-165; and
[0141] (d) a cytokine polypeptide comprising an amino acid sequence at least 90% identical to a sequence selected from SEQ ID NOS: 404-436, or to a contiguous sequence of at least 40, 50, 60, 70, 80 or 100 amino acid residues thereof, fused, via a domain linker, to the C-terminus of one of the polypeptide chains of the multispecific protein.

[0142] In one embodiment, a multispecific protein comprises: a polypeptide comprising an amino acid sequence having at least 80%, 90% or 95% sequence identity to the amino acid sequence of a first chain of a heterotrimeric protein described herein, a polypeptide comprising an amino acid sequence having at least 80%, 90% or 95% sequence identity to the amino acid sequence of a second chain of a heterotrimeric protein described herein and a polypeptide comprising an amino acid sequence having at least 80%, 90% or 95% sequence identity to the amino acid sequence of a third chain of a heterotrimeric protein described herein. In one embodiment, a multispecific protein comprises: a polypeptide comprising an amino acid sequence having at least 80%, 90% or 95% sequence identity to the amino acid sequence of a first chain of a heterodimeric protein described herein, and a polypeptide comprising an amino acid sequence having at least 80%, 90% or 95% sequence identity to the amino acid sequence of a second chain of a heterodimeric protein described herein.

[0143] In one embodiment, a multispecific protein comprises: a polypeptide comprising an amino acid sequence of a first chain of a heterotrimeric protein described herein, a polypeptide comprising an amino acid sequence of a heterotrimeric protein described herein and a polypeptide comprising an amino acid sequence of a third chain of a heterotrimeric protein described herein. In one embodiment, a multispecific protein comprises: a polypeptide comprising an amino acid sequence of a first chain of a heterodimeric protein described herein, and a polypeptide comprising an amino acid sequence of a second chain of a heterodimeric protein described herein.

[0144] In one embodiment, a multispecific protein comprises: a polypeptide comprising an amino acid sequence having at least 80%, 90% or 95% sequence identity to the amino acid sequence of SEQ ID NO: 175, a polypeptide comprising an amino acid sequence having at least 80%, 90% or 95% sequence identity to the amino acid sequence of SEQ ID NO: 176 and a polypeptide comprising an amino acid sequence having at least 80%, 90% or 95% sequence identity to the amino acid sequence of SEQ ID NO: 177.

[0145] In one embodiment, a multispecific protein comprises: a polypeptide comprising an amino acid sequence having at least 80%, 90% or 95% sequence identity to the amino acid sequence of SEQ ID NO: 193, a polypeptide comprising an amino acid sequence having at least 80%, 90% or 95% sequence identity to the amino acid sequence of SEQ ID NO: 185; and a polypeptide comprising an amino acid sequence having at least 80%, 90% or 95% sequence identity to the amino acid sequence of SEQ ID NO: 194.

[0146] In one embodiment, a multispecific protein comprises: a polypeptide comprising an amino acid sequence having at least 80%, 90% or 95% sequence identity to the amino acid sequence of SEQ ID NO: 199, a polypeptide comprising an amino acid sequence having at least 80%, 90% or 95% sequence identity to the amino acid sequence of SEQ ID NO: 200; and a polypeptide comprising an amino acid sequence having at least 80%, 90% or 95% sequence identity to the amino acid sequence of SEQ ID NO: 201.

[0147] In one embodiment, a multispecific protein comprises: a polypeptide comprising an amino acid sequence having at least 80%, 90% or 95% sequence identity to the amino acid sequence of SEQ ID NO: 209, a polypeptide comprising an amino acid sequence having at least 80%, 90% or 95% sequence identity to the amino acid sequence of SEQ ID NO: 210; and a polypeptide comprising an amino acid sequence having at least 80%, 90% or 95% sequence identity to the amino acid sequence of SEQ ID NO: 211.

[0148] In one embodiment, a multispecific protein comprises: a polypeptide comprising an amino acid sequence having at least 80%, 90% or 95% sequence identity to the amino acid sequence of SEQ ID NO: 212, a polypeptide comprising an amino acid sequence having at least 80%, 90% or 95% sequence identity to the amino acid sequence of SEQ ID NO: 213; and a polypeptide comprising an amino acid sequence having at least 80%, 90% or 95% sequence identity to the amino acid sequence of SEQ ID NO: 214.

[0149] In one embodiment, a multispecific protein comprises: a polypeptide comprising an amino acid sequence having at least 80%, 90% or 95% sequence identity to the amino acid sequence of SEQ ID NO: 215, a polypeptide comprising an amino acid sequence having at least 80%, 90% or 95% sequence identity to the amino acid sequence of SEQ ID NO: 216; and a polypeptide comprising an amino acid sequence having at least 80%, 90% or 95% sequence identity to the amino acid sequence of SEQ ID NO: 217.

[0150] In one embodiment, a multispecific protein comprises: a polypeptide comprising an amino acid sequence having at least 80%, 90% or 95% sequence identity to the amino acid sequence of SEQ ID NO: 218, a polypeptide comprising an amino acid sequence having at least 80%, 90% or 95% sequence identity to the amino acid sequence of SEQ ID NO: 219; and a polypeptide comprising an amino acid sequence having at least 80%, 90% or 95% sequence identity to the amino acid sequence of SEQ ID NO: 220.

[0151] In one aspect the invention provides an isolated multispecific heterotrimeric protein comprising a first polypeptide chain comprising an amino acid sequence which is at least 50%, 60%, 70%, 80%, 85%, 90%, 95%, 98 or 99% identical to the sequence of a first polypeptide chain of a T5, T6, T25 or T26 protein disclosed herein; a second polypeptide chain comprising an amino acid sequence which is at least 50%, 60%, 70%, 80%, 85%, 90%, 95%, 98 or 99% identical to the sequence of a second polypeptide chain of the respective T5, T6, T25 or T26 protein disclosed herein; and optionally a third polypeptide chain comprising an amino acid sequence which is at least 50%, 60%, 70%, 80%, 85%, 90%, 95%, 98 or 99% identical to the sequence of a third polypeptide chain of a T5, T6, T25 or T26 protein disclosed herein. In one embodiment, CDRs are excluded from the sequences that are considered for computing sequence identity. In one embodiment, VH and/or VL variable regions are excluded from the sequences that are considered for computing sequence identity of a polypeptide chain. Optionally each VH region comprises an amino acid sequence having at least about 80%, 85%, 90%, 95%, 97%, 98% or 99% identity, to the amino acid sequence of SEQ ID NOS: 3, 5, 7, 9, 11, 13, 112, 113, 115, 116, 117, 119, 120, 121, 123, 124, 125, 127, 128, 129, 132, 134, 136, 138, 140, 142, 144, 146, 148, 150, 152, 154 or and any of 236-313. Optionally each VL region comprises an amino acid sequence having at least about 80%, 85%, 90%, 95%, 97%, 98% or 99% identity, to the amino acid sequence of SEQ ID NOS: 4, 6, 8, 10, 12, 14, 114, 118, 122, 126, 130, 133, 135, 137, 139, 141, 143, 145, 147, 149, 151, 153, 155 or any of 314-403.

[0152] In one aspect of any of the embodiments described herein, provided is a recombinant nucleic acid encoding a first polypeptide chain, and/or a second polypeptide chain, and/or a third polypeptide chain and/or a fourth polypeptide. In one aspect of any of the embodiments described herein, the invention provides a recombinant host cell comprising a nucleic acid encoding a first polypeptide chain, and/or a second polypeptide chain and/or a third polypeptide chain, optionally wherein the host cell produces a multimeric or other protein according to the invention with a yield (final productivity or concentration before or after purification) of at least 1, 2, 3 or 4 mg/L. Also provided is a kit or set of nucleic acids comprising a recombinant nucleic acid encoding a first polypeptide chain of the according to the invention, a recombinant nucleic acid encoding a second polypeptide chain according to the invention, and, optionally, a recombinant nucleic acid encoding a third polypeptide chain according to the invention. Also provided are methods of making dimeric, trimeric and tetrameric proteins according to the invention.

[0153] In another embodiment, the disclosure provides novel variant IL-2 polypeptides that are particularly suited for use in an antigen binding protein, particularly an antigen binding protein that has an Fc domain, yet further wherein the Fc domain is modified to decrease or lack the ability to bind CD16A and/or other Fc gamma receptors. Provided herein is a modified or variant IL-2 polypeptide comprising the amino acid substitution T41A, wherein numbering of residues is with respect to the IL-2 polypeptide of SEQ ID NO: 404. In one embodiment, provided herein is a modified or variant IL-2 polypeptide comprising at least two, three, four, five, six or more amino acid substitutions, wherein the polypeptide comprises the substitutions T41A. In one embodiment, provided herein is a modified or variant IL-2 polypeptide comprising at least three amino acid substitutions, wherein the polypeptide comprises substitutions at residues R38, F42 and T41 compared to a human wild type IL-2 polypeptide, wherein number of residues is with respect to the IL-2 polypeptide of SEQ ID NO: 404. In one aspect, a modified or variant IL-2 polypeptide comprises at least three amino acid substitutions compared to a human wild type IL-2 polypeptide, wherein the polypeptide comprises the substitutions: R38A, F42K and T41X, wherein X is any amino acid residue. In one aspect, a modified or variant IL-2 polypeptide comprises at least three (e.g. 3, 4, 5, 6 or more) amino acid substitutions compared to a human wild type IL-2 polypeptide, wherein the polypeptide comprises the substitutions: R38A, F42K and T41A. In one aspect, the modified or variant IL2 comprises the amino acid sequence of SEQ ID NO: 408. In one aspect, the modified or variant IL2 comprises an amino acid sequence having at least about 80%, 85%, 90%, 95%, 97%, 98% or 99% identity to the IL-2 polypeptide of SEQ ID NO: 408, or to a contiguous sequence of at least 40, 50, 60, 70, 80 or 100 amino acid residues thereof. Provided also are proteins or polypeptides comprising the aforementioned modified or variant IL-2 polypeptide. In one embodiment, provided is the modified or variant IL-2 polypeptide fused (e.g., at its N-terminus) to a heterologous amino acid sequence or polypeptide. In one embodiment, provided is a polypeptide or protein (e.g. an Fc domain-containing protein, antigen binding protein, multispecific protein, or antibody) that binds an antigen of interest (e.g. cancer antigen or a receptor on an immune cell, optionally an NK cell) comprising the modified or variant IL-2 polypeptide, optionally wherein the IL-2 polypeptide is fused via a domain linker to the polypeptide or protein, optionally wherein the IL-2 polypeptide is fused via a domain linker to the C-terminus of the protein or polypeptide. In one embodiment, the protein or polypeptide that comprises the variant IL-2 comprises a human Fc domain, yet further wherein the Fc domain is modified to decrease or lack the ability to bind CD16A and/or other Fc gamma receptors. In some embodiments, the modified IL-2 has reduced binding affinity for CD25 relative to wild type IL-2. In some embodiments, the modified IL-2 has reduced activity on resting or activated T cells relative to wild type IL-2.

[0154] Any of the methods can further be characterized as comprising any step described in the application, including notably in the “Detailed Description of the Invention”). The invention further relates to methods of identifying, testing and/or making proteins described herein. The invention further relates to a multispecific protein obtainable by any of present methods. The disclosure further relates to pharmaceutical or diagnostic formulations containing at least one of the multispecific proteins disclosed herein. The disclosure further relates to methods of using the subject multispecific proteins in methods of treatment or diagnosis.

[0155] These and additional advantageous aspects and features of the invention may be further described elsewhere herein.

### BRIEF DESCRIPTION OF THE FIGURES

[0156] FIGS. 1A, 1B, 1C and 1D show structure/function relationships for multispecific NK cell engager (NKCE) protein comprising a variant IL2 (IL2v) binding on one face to a tumor antigen on a tumor cell, and on another face to an NK cell via a triple receptor cis-presentation of IL2βγ complex, NKp46 and CD16A. IL2v capture on NK cells may improve binding to CD122 and mimic CD25-mediated IL-2 presentation.

[0157] FIG. 2A shows an exemplary multispecific protein in T5 format that binds to NKp46, CD16A and CD122 on an NK cell, and to CD20 on a tumor cell. FIGS. 2B to 2N show different configurations of multispecific proteins that differ in the number of antigen of interest (e.g. cancer antigen) binding sites (1 or 2 sites), and in the configuration of the domains around an Fc domain dimer. In FIGS. 2G, H, J, K, L, M and N, the star in the CH3 domain indicates mutations H435R and Y436F (Kabat EU numbering).

[0158] FIG. 3 activation of TReg cells by T6 format proteins that contained either a wild-type IL-2 or a variant IL2, and that lacked binding to NKp46, CD16A and antigen of interest. The T6 protein containing the variant IL2 showed a strongly decreased ability to activate Treg cells compared to the T6 protein containing the wild-type IL-2.

[0159] FIG. 4 shows % of pSTAT5 cells among NK cells. CD20-T5-NKp46-IL2v and IC-T6-IC-IL2v displayed comparable activation of Treg cells, CD4 T cells and CD8 T cells. However, the CD20-T5-NKp46-IL2v resulted in an approximately 2-log increase in percent of pSTAT5+ cells among the NK cells, compared to IC-T6-IC-IL2 that did not bind NKp46 or CD16A. The CD20-T5-NKp46-IL2v protein permitted a selective activation of NK cells over Treg cells, CD4 T cells and CD8 T cells.

[0160] FIG. 5 shows % of pSTAT5 cells among NK cells. CD20-T5-NKp46-IL2v which bound both CD16 and NKp46 (in addition to the IL2v moiety) resulted in strong increase in potency (an approximately 1-log increase) in percent of pSTAT5+ cells among the NK cells, compared to CD20-T6-NKp46-IL2v. IL-2R signaling in NK cells was therefore enhanced by each of NKp46 and CD16, and with a particularly strong enhancement when both NKp46 and CD16 were bound in addition to IL-2R.

[0161] FIG. 6 shows % of CD69-expressing NK cells, in the absence of tumor cells. The CD20-T5-NKp46 that bound CD20, NKp46 and CD16 but lacked the IL2v moiety did not activate NK cells in the absence of tumor cells, while all the proteins containing the IL2v moiety resulted in strong NK cell activation, with an additional benefit seen for the proteins that had a NKp46 binding domain and a wild-type Fc domain compared to the IC-T6-IC-IL2v protein that lacked CD16 and NKp46 binding.

[0162] FIG. 7 shows % of proliferating NK cells in the absence of tumor cells on the y-axis and concentration of test protein on the x-axis. The CD20-T5-NKp46 that bound CD20, NKp46 and CD16 but lacked the IL2v moiety did not induce proliferation of NK cells, while all the proteins containing the IL2v moiety resulted in strong NK cell proliferation, although with differences in potency. All NK cell engager proteins with NKp46 binding domain and/or wild-type Fc domain (in addition to IL2v) were more potent in inducing NK cell proliferation compared to the IC-T6-IC-IL2v protein that lacked CD16 and NKp46 binding.

[0163] FIGS. 8A and 8B show % specific lysis induced by NK cells in a cytotoxicity assay at ET ratio 10:1. FIGS. 8C and 8D show % specific lysis induced by NK cells in a cytotoxicity assay at ET ratio 2:1. All of the NK cell engagers that retained the ability to bind both CD16 and NKp46 (in addition to CD20) displayed similarly high potency in terms of EC50 values in induction of NK cell cytotoxicity toward the tumor cells. The nature of the IL-2 polypeptide (either wild-type of the mutated IL2v) did not appear to differentially affect NK cell cytotoxicity, and furthermore the presence of IL2, whether as wild-type or IL2v, did not result in improved EC50 values in induction of cytotoxicity.

[0164] FIG. 9 shows cytokine production by NK cells in the presence of NK cell engagers and tumor cells. The NK cell engager proteins with NKp46 binding domain and wild-type Fc domain were more potent in inducing MIP1b and IFNγ production by NK cells. In absence of tumor targeting, as exemplified by the IC-T5-NKp46-IL2v construct that did not bind CD20, the NK cell engager did not elicit cytokine production by the NK cells.

[0165] FIG. 10 shows that administration to mice of CD20-T5-NKp46-IL2v NK cell engager protein that bound CD20, NKp46, CD16A and CD122 (right panel) showed strong anti-tumor efficacy as a single injection, compared to obinutuzumab (left panel).

[0166] FIG. 11 shows administration of the 25 μg dose of CD20-T5-NKp46-IL2v resulted in very strong and long anti-tumor activity in large volume tumors in mice, permitting tumors to generally stay below 300 mm³ in volume for the duration of the study.

[0167] FIG. 12 shows that CD20-T5-NKp46-IL2v NK cell engager protein that binds CD20, NKp46, CD16A and CD122 showed strong efficacy in a mouse tumor model when administered as two injections separated by a one week, starting at day 9 post tumor engraftment when tumors had grown to 60 mm³ in volume. In comparison, in the CD20-T5-IC-IL2v group and in the CD20-F5-NKp46, tumor were somewhat initially controlled during week after treatment but then rapidly grew past 300 mm³ in volume thereafter. NKp46 and CD122 binding are important to efficient control tumor growth and their simultaneous targeting drives the strong antitumor efficacy of the CD20-T5-NKp46-IL2v molecule.

[0168] FIG. 13 left hand panel shows that tumors harvested from mice treated by the CD20-T5-NKp46-IL2v NK cell engager protein that bound CD20, NKp46, CD16A and CD122 showed high expression of the ncr1 transcript (encoding for NKp46 protein and highly specific for NK cells), demonstrating an increase of NK cell infiltration in tumor. In comparison, tumors harvested in mice treated by the CD20-F5-NKp46 protein or obinutuzumab showed only minor increase of ncr1 transcripts revealing a much lower NK cell infiltrate in tumors. The right hand panel shows that tumors harvested in mice treated by the CD20-T5-NKp46-IL2v NK cell engager protein showed higher expression of the interferon gamma (ifng) transcript compared to other treated conditions, showing that NK cells are activated.

[0169] FIG. 14 shows in the upper right hand panel shows that treatment with the CD20-T5-NKp46-IL2v NK cell engager controlled tumor growth (days of treatment shown with arrows). However, NK cell depletion resulted in a loss of control of tumor growth by about day 30 (lower right hand panel) while tumor are still controlled in mice not depleted for NK cells.

[0170] FIG. 15 shows % of pSTAT5 cells among PBMC. All the GA101-T5-NKp46-IL2v NK cell engager proteins were comparable in their ability to induce IL2R signaling preferentially in NK cells over TReg cells, CD8 T cells and CD4 T cells whatever the length of the linker between the IL2v and the C-terminus of the NKp46-binding Fab.

[0171] FIG. 16 shows cytotoxicity potentiated by the NKCE proteins in the “T5” and “T6” formats in which the NKp46-binding domain based on the NKp46-1 VH/VL pair is positioned between the Fc domain dimer and the C-terminal IL2v, with 10 amino linker, short (5 aa) linker or long (15 aa) linker; the proteins were all comparable in their ability to potentiated NK cell cytotoxicity towards tumor cells.

[0172] FIG. 17 shows cytotoxicity potentiated by the NKCE proteins in the T5” and “T6” formats in which the NKp46-binding domain based on the NKp46-4 VH/VL pair is positioned between the Fc domain dimer and the C-terminal IL2v, with 10 amino linker, short (5 aa) linker or long (15 aa) linker; the proteins were all comparable in their ability to potentiated NK cell cytotoxicity towards tumor cells.

[0173] FIG. 18 shows the structure of the proteins tested in FIGS. 15, 16 and 17.

[0174] FIG. 19 shows % of pSTAT5 cells among PBMC cells. The CD20-T5-NKp46-IL2v, CD20-T5-NKp46-IL2v2 and CD20-T5-NKp46-IL2v3 having different IL-2 moieties were comparable and each resulted in an approximately 2-log increase in percent of pSTAT5+ cells among the NK cells, compared to IC-T6-IC-IL2 (IL2pWT) that contained wild-type IL-2 and did not bind NKp46 or CD16A. The CD20-T5-NKp46-IL2v protein therefore permitted a selective activation of NK cells over Treg cells, CD4 T cells and CD8 T cells. Substitution of different “not-alpha” cytokine variants does not impact ability of the NKCE-IL2v protein to selectively activate NK cells over Treg cells, CD4 T cells and CD8 T cells.

[0175] FIG. 20 shows IL-6 production and the right panel showing TNFα production over time following treatment with a 25 or 70 μg dose of CD20-T5-NKp46-IL2v NK cell engager; the left bar shows plasma concentration of cytokine for the 70 μg dose and the right bar shows plasma concentration of cytokine for the 25 μg dose.

[0176] FIGS. 21A and 21B show the domain structure of different multispecific proteins lacking cytokine moieties used to study the mechanism of action of multispecific proteins, including Format 2 (F2), Format 5 (F5), Format 7 (F7), Format 13 (F13) and Format 14 (F14) proteins.

[0177] FIG. 22 (22A: CD107 and 22B: CD69) shows activation of NK cells by multispecific proteins that bind CD19, CD16A and NKp46, in the presence of target-antigen expressing cells. Each of the CD19×NKp46 binding proteins (respectively including NKp46-1, NKp46-2, NKp46-3, NKp46-4 or NKp46-9 variable regions) activated NK cells in the presence of Daudi cells.

[0178] FIG. 23 shows ability to direct purified NK cells to lyse CD19-positive Daudi tumor target cells by CD19×NKp46 binding proteins. CD19-F6-NKp46 protein whose Fc domain does not bind CD16A due to a N297 substitution was as potent in mediating NK cell lysis of Daudi target cells as the bivalent CD19-binding full-length IgG1 anti-CD19 antibody, and the CD19-F5-NKp46 (F5 format protein) whose Fc domain binds CD16A was even more potent.

[0179] FIG. 24 shows that the NKp46×EGFR NKCE protein, whose Fc domain binds CD16, is highly potent in mediating A549 target cell lysis.

[0180] FIG. 25 shows that the NKp46×ROR1 NKCE protein, whose Fc domain binds CD16, is highly potent in mediating Mino tumor target cell lysis.

[0181] FIG. 26 shows that the NKp46×KIR3DL2 NKCE protein, whose Fc domain binds CD16, is highly potent in mediating HUT78 tumor target cell lysis.

[0182] FIG. 27 shows % of pSTAT5 cells among NK cells on the y-axis and concentration of test protein on the x-axis upon, where incubation with CD20-T5A-NKp46-IL15 induced a decrease in the EC50 for STAT5 phosphorylation among the NK cells, compared to CD20-T6AB3-ICb-IL15 that did not bind NKp46 or CD16A.

[0183] FIG. 28 shows % of proliferating NK, CD4 T or CD8 T cells on the y-axis and concentration of test protein on the x-axis, where incubation with CD20-T5A-NKp46-IL15 resulted in strong NK cell proliferation, with an increase in potency compared to the CD20-T6AB3-IC-IL15 protein that did not bind NKp46 or CD16A. The increase in potency was selective for NK cells, as there was no increase potency by CD20-T5A-NKp46-IL15 for induction of CD4 and CD8 T cell proliferation.

[0184] FIG. 29 shows % specific lysis of tumor cells by NK cells on the y-axis and concentration of test protein on the x-axis. The IC-T5A-NKp46-IL15 that lacked binding to CD20 on targeted cells did not induce significant cytotoxicity toward the tumor cells, while the CD20-T5A-NKp46-IL15 displayed high potency.

[0185] FIG. 30, left hand panel, shows % of CD69 expressing NK cells on the y-axis and concentration of test protein on the x-axis, and right hand panel shows median fluorescence intensity (medFI) of CD69 expression in NK cells. CD20-T5A-NKp46-IL18v induced a decrease in the range of two orders of magnitude in the EC₅₀ for activation of NK cells, compared to GA101-T6AB3-IC-IL18v that did not bind CD16A or NKp46 on NK cells.

[0186] FIG. 31 shows % of IFN-γ expressing NK cells on the y-axis and concentration of test protein on the x-axis upon incubation with CD20-T5A-NKp46-IL18v which induced a decrease in the range of two orders of magnitude in the EC₅₀ for activation of NK cells, compared to CD20-T6AB3-IC-IL18v that did not bind CD16A or NKp46 on NK cells.

[0187] FIG. 32 shows % of proliferating NK, CD4 T or CD8 T cells on the y-axis and concentration of test protein on the x-axis upon incubation with the CD20-T5A-NKp46-IL18v protein which resulted in strong NK cell proliferation that was selective over CD4 and CD8 T cells. The CD20-T6AB3-IC-IL18v protein that did not bind CD16A or NKp46 did not show significant activation of NK cells.

[0188] FIG. 33 shows % specific lysis of tumor cells by NK cells on the y-axis and concentration of test protein on the x-axis, upon incubation with CD20-T5A-NKp46-IL18v protein. The IC-T5A-NKp46-IL18v that lacked binding to CD20 on targeted cells did not induce significant cytotoxicity.

[0189] FIG. 34 shows % of pSTAT3 cells among NK cells, CD4 T or CD8 T cells on the y-axis and concentration of test protein on the x-axis, upon incubation with CD20-T5A-NKp46-IFNαv which induced potent STAT3 phosphorylation selectively among the NK cells over CD4 or CD8 T cells, compared to CD20-T6AB3-IC-IFNαv that did not induce any significant NK cell activation.

[0190] FIG. 35 shows % specific lysis of tumor cells by NK cells on the y-axis and concentration of test protein on the x-axis upon incubation with CD20-T5A-NKp46-IFNαv which displayed high potency in terms of EC₅₀ values in induction of NK cell cytotoxicity.

[0191] FIG. 36 shows the difference from baseline of the B cell count (cells/μL) over the 14 days before and 30 days following treatment of non-human primates with the NKCE proteins, showing that the NKCE proteins induced B cell depletion, while control (vehicle) did not FIG. 37 shows production of different cytokines over the course of 24 hours following administration of the NKCE proteins to non-human primates.

[0192] FIG. 38 shows mean values for red blood cells, platelets, hemoglobin, hematocrit, mean corpuscular volume, mean corpuscular hemoglobin and mean corpuscular hemoglobin concentration for non-human primates treated with the NKCEs or vehicle over a period from 14 days before treatment through 30 days following treatment

[0193] FIG. 39 shows levels of white blood cells, lymphocytes, monocytes, neutrophils, eosinophils and basophils cells in non-human primates over a period from 14 days before treatment through 30 days following treatment

[0194] FIG. 40 shows levels of NK cells, CD8+ T cells, FoxP3-CD4+ T cells and FoxP3⁺CD4+ T cells in non-human primates over a period from 14 days before treatment through 30 days following treatment.

[0195] FIG. 41 shows results of flow cytometry for staining for expression of NK1.1 and CD3 in cells from tumors in mice following treatment with CD20-T5-NKp46-IL2v, showing that CD20-T5-NKp46-IL2v stimulated accumulation of NK cells (NK1.1⁺CD3−) at the tumor site.

[0196] FIG. 42 shows number of NK cell/spleen, % of CD69-expressing NK cells in spleen and Ki67-expressing NK cells in spleen, following treatment of mice. The CD20-F5-NKp46 protein and obinutuzumab did not increase the number of NK cells, while treatment with CD20-T5-NKp46-IL2v caused a strong increase in NK cells in the spleen. Additionally, CD20-T5-NKp46-IL2v caused a strong increase in activated or proliferating NK cells among total NK cells.

[0197] FIG. 43 shows number of NK cell/μL of blood, % of CD69-expressing NK cells in blood, % of CD69-expressing NK cells in spleen and Ki67-expressing NK cells in spleen, following treatment of mice. Treatment with CD20-T5-NKp46-IL2v caused a strong increase in NK cell number per μl of blood and also in the spleen, as well as strong increase in activated (CD69-expressing) NK cells among NK cells in blood and spleen.

### DETAILED DESCRIPTION OF THE INVENTION

### Definitions

[0198] As used in the specification, “a” or “an” may mean one or more. As used in the claim(s), when used in conjunction with the word “comprising”, the words “a” or “an” may mean one or more than one.

[0199] Where “comprising” is used, this can optionally be replaced by “consisting essentially of”, or optionally by “consisting of”.

[0200] As used herein, the term “antigen binding domain” or “ABD” refers to a domain comprising a three-dimensional structure capable of immunospecifically binding to an epitope. Thus, in one embodiment, said domain can comprise a hypervariable region, optionally a V_{H} and/or V_{L} domain of an antibody chain, optionally at least a V_{H} domain. In another embodiment, the binding domain may comprise at least one complementarity determining region (CDR) of an antibody chain. In another embodiment, the binding domain may comprise a polypeptide domain from a non-immunoglobulin scaffold.

[0201] The term “antibody” herein is used in the broadest sense and specifically includes full-length monoclonal antibodies, polyclonal antibodies, multispecific antibodies (e.g., bispecific antibodies), and antibody fragments and derivatives, so long as they exhibit the desired biological activity. Various techniques relevant to the production of antibodies are provided in, e.g., Harlow, et al., ANTIBODIES: A LABORATORY MANUAL, Cold Spring Harbor Laboratory Press, Cold Spring Harbor, N.Y., (1988). An “antibody fragment” comprises a portion of a full-length antibody, e.g. antigen-binding or variable regions thereof. Examples of antibody fragments include Fab, Fab′, F(ab)₂, F(ab′)₂, F(ab)₃, Fv (typically the V_{L} and V_{H} domains of a single arm of an antibody), single-chain Fv (scFv), dsFv, Fd fragments (typically the V_{H} and CH1 domain), and dAb (typically a V_{H} domain) fragments; V_{H}, V_{L}, VhH, and V-NAR domains; minibodies, diabodies, triabodies, tetrabodies, and kappa bodies (see, e.g., Ill et al., Protein Eng 1997; 10: 949-57); camel IgG; IgNAR; and multispecific antibody fragments formed from antibody fragments, and one or more isolated CDRs or a functional paratope, where isolated CDRs or antigen-binding residues or polypeptides can be associated or linked together so as to form a functional antibody fragment. Various types of antibody fragments have been described or reviewed in, e.g., Holliger and Hudson, Nat Biotechnol 2005; 23, 1126-1136; WO2005040219, and published U.S. Patent Applications 20050238646 and 20020161201.

[0202] The term “hypervariable region” when used herein refers to the amino acid residues of an antibody that are responsible for antigen binding. The hypervariable region generally comprises amino acid residues from a “complementarity-determining region” or “CDR” (e.g. residues 24-34 (L1), 50-56 (L2) and 89-97 (L3) in the light-chain variable domain and 31-35 (H1), 50-65 (H2) and 95-102 (H3) in the heavy-chain variable domain; Kabat et al. 1991) and/or those residues from a “hypervariable loop” (e.g. residues 26-32 (L1), 50-52 (L2) and 91-96 (L3) in the light-chain variable domain and 26-32 (H1), 53-55 (H2) and 96-101 (H3) in the heavy-chain variable domain; Chothia and Lesk, J. Mol. Biol 1987; 196:901-917). Typically, the numbering of amino acid residues in this region is performed by the method described in Kabat et al., supra. Phrases such as “Kabat position”, “variable domain residue numbering as in Kabat” and “according to Kabat” herein refer to this numbering system for heavy chain variable domains or light chain variable domains. Using the Kabat numbering system, the actual linear amino acid sequence of a peptide may contain fewer or additional amino acids corresponding to a shortening of, or insertion into, a FR or CDR of the variable domain. For example, a heavy chain variable domain may include a single amino acid insert (residue 52a according to Kabat) after residue 52 of CDR H2 and inserted residues (e.g. residues 82a, 82b, and 82c, etc. according to Kabat) after heavy chain FR residue 82. The Kabat numbering of residues may be determined for a given antibody by alignment at regions of homology of the sequence of the antibody with a “standard” Kabat numbered sequence.

[0203] By “framework” or “FR” residues as used herein is meant the region of an antibody variable domain exclusive of those regions defined as CDRs. Each antibody variable domain framework can be further subdivided into the contiguous regions separated by the CDRs (FR1, FR2, FR3 and FR4).

[0204] By “constant region” as defined herein is meant an antibody-derived constant region that is encoded by one of the light or heavy chain immunoglobulin constant region genes.

[0205] By “constant light chain” or “light chain constant region” or “CL” as used herein is meant the region of an antibody encoded by the kappa (Cκ) or lambda (Cλ) light chains. The constant light chain typically comprises a single domain, and as defined herein refers to positions 108-214 of Cκ, or Cλ, wherein numbering is according to the EU index (Kabat et al., 1991, Sequences of Proteins of Immunological Interest, 5th Ed., United States Public Health Service, National Institutes of Health, Bethesda).

[0206] By “constant heavy chain” or “heavy chain constant region” as used herein is meant the region of an antibody encoded by the mu, delta, gamma, alpha, or epsilon genes to define the antibody's isotype as IgM, IgD, IgG, IgA, or IgE, respectively. For full length IgG antibodies, the constant heavy chain, as defined herein, refers to the N-terminus of the CH1 domain to the C-terminus of the CH3 domain, thus comprising positions 118-447, wherein numbering is according to the EU index.

[0207] By “Fab” or “Fab region” as used herein is meant a unit that comprises the V_{H}, CH1, V_{L}, and CL immunoglobulin domains. The term Fab includes a unit that comprises a V_{H}-CH1 moiety that associates with a V_{L}-CL moiety, as well as crossover Fab structures in which there is crossing over or interchange between light- and heavy-chain domains. For example a Fab may have a V_{H}-CL unit that associates with a V_{L}-CH1 unit. Fab may refer to this region in isolation, or this region in the context of a protein, multispecific protein or ABD, or any other embodiments as outlined herein.

[0208] By “single-chain Fv” or “scFv” as used herein are meant antibody fragments comprising the V_{H} and V_{L} domains of an antibody, wherein these domains are present in a single polypeptide chain. Generally, the Fv polypeptide further comprises a polypeptide linker between the V_{H} and V_{L} domains which enables the scFv to form the desired structure for antigen binding. Methods for producing scFvs are well known in the art. For a review of methods for producing scFvs see Pluckthun in The Pharmacology of Monoclonal Antibodies, vol. 113, Rosenburg and Moore eds. Springer-Verlag, New York, pp. 269-315 (1994).

[0209] By “Fv” or “Fv fragment” or “Fv region” as used herein is meant a polypeptide that comprises the V_{L} and V_{H} domains of a single antibody.

[0210] By “Fc” or “Fc region”, as used herein is meant the polypeptide comprising the constant region of an antibody excluding the first constant region immunoglobulin domain. Thus Fc refers to the last two constant region immunoglobulin domains of IgA, IgD, and IgG, and the last three constant region immunoglobulin domains of IgE and IgM, and the flexible hinge N-terminal to these domains. For IgA and IgM, Fc may include the J chain. For IgG, Fc comprises immunoglobulin domains Cγ2 (CH2) and Cγ3 (CH3) and optionally the hinge between Cγ1 and Cγ2. Although the boundaries of the Fc region may vary, the human IgG heavy chain Fc region is usually defined to comprise residues C226, P230 or A231 to its carboxyl-terminus, wherein the numbering is according to the EU index. Fc may refer to this region in isolation, or this region in the context of an Fc polypeptide, as described below. By “Fc polypeptide” or “Fc-derived polypeptide” as used herein is meant a polypeptide that comprises all or part of an Fc region. Fc polypeptides herein include but are not limited to antibodies, Fc fusions and Fc fragments. Also, Fc regions according to the invention include variants containing at least one modification that alters (enhances or diminishes) an Fc associated effector function. Also, Fc regions according to the invention include chimeric Fc regions comprising different portions or domains of different Fc regions, e.g., derived from antibodies of different isotype or species.

[0211] By “variable region” as used herein is meant the region of an antibody that comprises one or more Ig domains substantially encoded by any of the V_{L} (including Vκ (Vκ) and Vλ) and/or V_{H} genes that make up the light chain (including κ and λ) and heavy chain immunoglobulin genetic loci respectively. A light or heavy chain variable region (V_{L} or V_{H}) consists of a “framework” or “FR” region interrupted by three hypervariable regions referred to as “complementarity determining regions” or “CDRs”. The extent of the framework region and CDRs have been precisely defined, for example as in Kabat (see “Sequences of Proteins of Immunological Interest,” E. Kabat et al., U.S. Department of Health and Human Services, (1983)), and as in Chothia. The framework regions of an antibody, that is the combined framework regions of the constituent light and heavy chains, serves to position and align the CDRs, which are primarily responsible for binding to an antigen.

[0212] The term “specifically binds to” means that an antibody or polypeptide can bind preferably in a competitive binding assay to the binding partner, e.g. NKp46, as assessed using either recombinant forms of the proteins, epitopes therein, or native proteins present on the surface of isolated target cells. Competitive binding assays and other methods for determining specific binding are further described below and are well known in the art.

[0213] When an antibody or polypeptide is said to “compete with” a particular multispecific protein or a particular monoclonal antibody (e.g. NKp46-1, -2, -4, -6 or -9 in the context of an anti-NKp46 mono-specific antibody or a multi-specific protein), it means that the antibody or polypeptide competes with the particular multispecific protein or monoclonal antibody in a binding assay using either recombinant target (e.g. NKp46) molecules or surface expressed target (e.g. NKp46) molecules. For example, if a test antibody reduces the binding of NKp46-1, -2, -4, -6 or -9 to a NKp46 polypeptide or NKp46-expressing cell in a binding assay, the antibody is said to “compete” respectively with NKp46-1, -2, -4, -6 or -9.

[0214] The term “affinity”, as used herein, means the strength of the binding of an antibody or protein to an epitope. The affinity of an antibody is given by the dissociation constant K_{D}, defined as [Ab]×[Ag]/[Ab−Ag], where [Ab−Ag] is the molar concentration of the antibody-antigen complex, [Ab] is the molar concentration of the unbound antibody and [Ag] is the molar concentration of the unbound antigen. The affinity constant K_{A} is defined by 1/K_{D}. Preferred methods for determining the affinity of proteins can be found in Harlow, et al., Antibodies: A Laboratory Manual, Cold Spring Harbor Laboratory Press, Cold Spring Harbor, N.Y., 1988), Coligan et al., eds., Current Protocols in Immunology, Greene Publishing Assoc. and Wiley Interscience, N.Y., (1992, 1993), and Muller, Meth. Enzymol. 92:589-601 (1983), which references are entirely incorporated herein by reference. One preferred and standard method well known in the art for determining the affinity of proteins is the use of surface plasmon resonance (SPR) screening (such as by analysis with a BIAcore™ SPR analytical device).

[0215] Within the context of this invention a “determinant” designates a site of interaction or binding on a polypeptide.

[0216] The term “epitope” refers to an antigenic determinant, and is the area or region on an antigen to which an antibody or protein binds. A protein epitope may comprise amino acid residues directly involved in the binding as well as amino acid residues which are effectively blocked by the specific antigen binding antibody or peptide, i.e., amino acid residues within the “footprint” of the antibody. It is the simplest form or smallest structural area on a complex antigen molecule that can combine with e.g., an antibody or a receptor. Epitopes can be linear or conformational/structural. The term “linear epitope” is defined as an epitope composed of amino acid residues that are contiguous on the linear sequence of amino acids (primary structure). The term “conformational or structural epitope” is defined as an epitope composed of amino acid residues that are not all contiguous and thus represent separated parts of the linear sequence of amino acids that are brought into proximity to one another by folding of the molecule (secondary, tertiary and/or quaternary structures). A conformational epitope is dependent on the 3-dimensional structure. The term ‘conformational’ is therefore often used interchangeably with ‘structural’. Epitopes may be identified by different methods known in the art including but not limited to alanine scanning, phage display, X-ray crystallography, array-based oligo-peptide scanning or pepscan analysis, site-directed mutagenesis, high throughput mutagenesis mapping, H/D-Ex Mass Spectroscopy, homology modeling, docking, hydrogen-deuterium exchange, among others. (See e.g., Tong et al., Methods and Protocols for prediction of immunogenic epitopes”, Briefings in Bioinformatics 8(2):96-108; Gershoni, Jonathan M; Roitburd-Berman, Anna; Siman-Tov, Dror D; Tarnovitski Freund, Natalia; Weiss, Yael (2007). “Epitope Mapping”. BioDrugs 21 (3): 145-56; and Flanagan, Nina (May 15, 2011); “Mapping Epitopes with H/D-Ex Mass Spec: ExSAR Expands Repertoire of Technology Platform Beyond Protein Characterization”, Genetic Engineering & Biotechnology News 31 (10).

[0217] “Valent” or “valency” denotes the presence of a determined number of antigen-binding moieties in the antigen-binding protein. A natural IgG has two antigen-binding moieties and is bivalent. A molecule having one binding moiety for a particular antigen is monovalent for that antigen.

[0218] By “amino acid modification” herein is meant an amino acid substitution, insertion, and/or deletion in a polypeptide sequence. An example of amino acid modification herein is a substitution. By “amino acid modification” herein is meant an amino acid substitution, insertion, and/or deletion in a polypeptide sequence. By “amino acid substitution” or “substitution” herein is meant the replacement of an amino acid at a given position in a protein sequence with another amino acid. For example, the substitution Y50W refers to a variant of a parent polypeptide, in which the tyrosine at position 50 is replaced with tryptophan. Amino acid substitutions are indicated by listing the residue present in wild-type protein/position of residue/residue present in mutant protein. A “variant” of a polypeptide refers to a polypeptide having an amino acid sequence that is substantially identical to a reference polypeptide, typically a native or “parent” polypeptide. The polypeptide variant may possess one or more amino acid substitutions, deletions, and/or insertions at certain positions within the native amino acid sequence.

[0219] “Conservative” amino acid substitutions are those in which an amino acid residue is replaced with an amino acid residue having a side chain with similar physicochemical properties. Families of amino acid residues having similar side chains are known in the art, and include amino acids with basic side chains (e.g., lysine, arginine, histidine), acidic side chains (e.g., aspartic acid, glutamic acid), uncharged polar side chains (e.g., glycine, asparagine, glutamine, serine, threonine, tyrosine, cysteine, tryptophan), nonpolar side chains (e.g., alanine, valine, leucine, isoleucine, proline, phenylalanine, methionine), beta-branched side chains (e.g., threonine, valine, isoleucine) and aromatic side chains (e.g., tyrosine, phenylalanine, tryptophan, histidine).

[0220] The term “identity” or “identical”, when used in a relationship between the sequences of two or more polypeptides, refers to the degree of sequence relatedness between polypeptides, as determined by the number of matches between strings of two or more amino acid residues. “Identity” measures the percent of identical matches between the smaller of two or more sequences with gap alignments (if any) addressed by a particular mathematical model or computer program (i.e., “algorithms”). Identity of related polypeptides can be readily calculated by known methods. Such methods include, but are not limited to, those described in Computational Molecular Biology, Lesk, A. M., ed., Oxford University Press, New York, 1988; Biocomputing: Informatics and Genome Projects, Smith, D. W., ed., Academic Press, New York, 1993; Computer Analysis of Sequence Data, Part 1, Griffin, A. M., and Griffin, H. G., eds., Humana Press, New Jersey, 1994; Sequence Analysis in Molecular Biology, von Heinje, G., Academic Press, 1987; Sequence Analysis Primer, Gribskov, M. and Devereux, J., eds., M. Stockton Press, New York, 1991; and Carillo et al., SIAM J. Applied Math. 48, 1073 (1988).

[0221] Preferred methods for determining identity are designed to give the largest match between the sequences tested. Methods of determining identity are described in publicly available computer programs. Preferred computer program methods for determining identity between two sequences include the GCG program package, including GAP (Devereux et al., Nucl. Acid. Res. 12, 387 (1984); Genetics Computer Group, University of Wisconsin, Madison, Wis.), BLASTP, BLASTN, and FASTA (Altschul et al., J. Mol. Biol. 215, 403-410 (1990)). The BLASTX program is publicly available from the National Center for Biotechnology Information (NCBI) and other sources (BLAST Manual, Altschul et al. NCB/NLM/NIH Bethesda, Md. 20894; Altschul et al., supra). The well-known Smith Waterman algorithm may also be used to determine identity.

[0222] An “isolated” molecule is a molecule that is the predominant species in the composition wherein it is found with respect to the class of molecules to which it belongs (i.e., it makes up at least about 50% of the type of molecule in the composition and typically will make up at least about 70%, at least about 80%, at least about 85%, at least about 90%, at least about 95%, or more of the species of molecule, e.g., peptide, in the composition). Commonly, a composition of a polypeptide will exhibit 98%, 98%, or 99% homogeneity for polypeptides in the context of all present peptide species in the composition or at least with respect to substantially active peptide species in the context of proposed use.

[0223] In the context herein, “treatment” or “treating” refers to preventing, alleviating, managing, curing or reducing one or more symptoms or clinically relevant manifestations of a disease or disorder, unless contradicted by context. For example, “treatment” of a patient in whom no symptoms or clinically relevant manifestations of a disease or disorder have been identified is preventive or prophylactic therapy, whereas “treatment” of a patient in whom symptoms or clinically relevant manifestations of a disease or disorder have been identified generally does not constitute preventive or prophylactic therapy.

[0224] As used herein, the phrase “NK cells” refers to a sub-population of lymphocytes that is involved in non-conventional immunity. NK cells can be identified by virtue of certain characteristics and biological properties, such as the expression of specific surface antigens including CD56 and/or NKp46 for human NK cells, the absence of the alpha/beta or gamma/delta TCR complex on the cell surface, the ability to bind to and kill cells that fail to express “self” MHC/HLA antigens by the activation of specific cytolytic machinery, the ability to kill tumor cells or other diseased cells that express a ligand for NK activating receptors, and the ability to release protein molecules called cytokines that stimulate or inhibit the immune response. Any of these characteristics and activities can be used to identify NK cells, using methods well known in the art. Any subpopulation of NK cells will also be encompassed by the term NK cells. Within the context herein “active” NK cells designate biologically active NK cells, including NK cells having the capacity of lysing target cells or enhancing the immune function of other cells. NK cells can be obtained by various techniques known in the art, such as isolation from blood samples, cytapheresis, tissue or cell collections, etc. Useful protocols for assays involving NK cells can be found in Natural Killer Cells Protocols (edited by Campbell K S and Colonna M). Humana Press. pp. 219-238 (2000).

[0225] As used herein, an agent that has “agonist” activity at NKp46 is an agent that can cause or increase “NKp46 signaling”. “NKp46 signaling” refers to an ability of an NKp46 polypeptide to activate or transduce an intracellular signaling pathway. Changes in NKp46 signaling activity can be measured, for example, by assays designed to measure changes in NKp46 signaling pathways, e.g. by monitoring phosphorylation of signal transduction components, assays to measure the association of certain signal transduction components with other proteins or intracellular structures, or in the biochemical activity of components such as kinases, or assays designed to measure expression of reporter genes under control of NKp46-sensitive promoters and enhancers, or indirectly by a downstream effect mediated by the NKp46 polypeptide (e.g. activation of specific cytolytic machinery in NK cells). Reporter genes can be naturally occurring genes (e.g. monitoring cytokine production) or they can be genes artificially introduced into a cell. Other genes can be placed under the control of such regulatory elements and thus serve to report the level of NKp46 signaling.

[0226] “NKp46” refers to a protein or polypeptide encoded by the Ncr1 gene or by a cDNA prepared from such a gene. Any naturally occurring isoform, allele, ortholog or variant is encompassed by the term NKp46 polypeptide (e.g., an NKp46 polypeptide 90%, 95%, 98% or 99% identical to SEQ ID NO 1, or a contiguous sequence of at least 20, 30, 50, 100 or 200 amino acid residues thereof). The 304 amino acid residue sequence of human NKp46 (isoform a) is shown below:

(SEQ ID NO: 1)
MSSTLPALLC VGLCLSQRIS AQQQTLPKPF IWAEPHFMVP
KEKQVTICCQ GNYGAVEYQL HFEGSLFAVD RPKPPERINK
VKFYIPDMNS RMAGQYSCIY RVGELWSEPS NLLDLVVTEM
YDTPTLSVHP GPEVISGEKV TFYCRLDTAT SMFLLLKEGR
SSHVQRGYGK VQAEFPLGPV TTAHRGTYRC FGSYNNHAWS
FPSEPVKLLV TGDIENTSLA PEDPTFPADT WGTYLLTTET
GLQKDHALWD HTAQNLLRMG LAFLVLVALV WFLVEDWLSR
KRTRERASRA STWEGRRRLN TQTL.

[0227] SEQ ID NO: 1 corresponds to NCBI accession number NP_004820, the disclosure of which is incorporated herein by reference. The human NKp46 mRNA sequence is described in NCBI accession number NM_004829, the disclosure of which is incorporated herein by reference.

### Producing Polypeptides

[0228] The proteins described herein can be conveniently configured and produced using well known immunoglobulin-derived domains, notably heavy and light chain variable domains, hinge regions, CH1, CL, CH2 and CH3 constant domains, and wild-type or variant cytokine polypeptides. Domains placed on a common polypeptide chain can be fused to one another either directly or connected via linkers, depending on the particular domains concerned. The immunoglobulin-derived domains will preferably be humanized or of human origin, thereby providing decreased risk of immunogenicity when administered to humans. As shown herein, advantageous protein formats are described that use minimal non-immunoglobulin linking amino acid sequences (e.g. not more than 4 or 5 domain linkers, in some cases as few as 1 or 2 domain linkers, and use of domains linkers of short length), thereby further reducing risk of immunogenicity.

[0229] Immunoglobulin variable domains are commonly derived from antibodies (immunoglobulin chains), for example in the form of associated V_{L} and V_{H} domains found on two polypeptide chains, or a single chain antigen binding domain such as a scFv, a V_{H} domain, a V_{L} domain, a dAb, a V-NAR domain or a V_{H}H domain. In certain advantageous proteins formats disclosed herein that directly enable the use of a wide range of variable regions from Fab or scFv without substantial further requirements for pairing and/or folding, the an antigen binding domain (e.g., ABD₁ and ABD₂) can also be readily derived from antibodies as a Fab or scFv.

[0230] The term “antigen-binding protein” can be used to refer to an immunoglobulin derivative with antigen binding properties. The binding protein comprises an immunologically functional immunoglobulin portion capable of binding to a target antigen. The immunologically functional immunoglobulin portion may comprise immunoglobulins, or portions thereof, fusion peptides derived from immunoglobulin portions or conjugates combining immunoglobulin portions that form an antigen binding site. Each antigen binding moiety comprises at least the necessarily one, two or three CDRs of the immunoglobulin heavy and/or light chains from which the antigen binding moiety was derived. In some aspects, an antigen-binding protein can consist of a single polypeptide chain (a monomer). In other embodiments the antigen-binding protein comprises at least two polypeptide chains. Such an antigen-binding protein is a multimer, e.g., dimer, trimer or tetramer. Examples of antigen binding proteins includes antibody fragments, antibody derivatives or antibody-like binding proteins that retain specificity and affinity for their antigen.

[0231] Typically, antibodies are initially obtained by immunization of a non-human animal, e.g., a mouse, rat, guinea pig or rabbit, with an immunogen comprising a polypeptide, or a fragment or derivative thereof, typically an immunogenic fragment, for which it is desired to obtain antibodies (e.g. a human polypeptide). The step of immunizing a non-human mammal with an antigen may be carried out in any manner well known in the art for stimulating the production of antibodies in a mouse (see, for example, E. Harlow and D. Lane, Antibodies: A Laboratory Manual, Cold Spring Harbor Laboratory Press, Cold Spring Harbor, NY (1988), the entire disclosure of which is herein incorporated by reference). Human antibodies may also be produced by using, for immunization, transgenic animals that have been engineered to express a human antibody repertoire (Jakobovitz et al. Nature 362 (1993) 255), or by selection of antibody repertoires using phage display methods. For example, a XenoMouse (Abgenix, Fremont, CA) can be used for immunization. A XenoMouse is a murine host that has had its immunoglobulin genes replaced by functional human immunoglobulin genes. Thus, antibodies produced by this mouse or in hybridomas made from the B cells of this mouse, are already humanized. The XenoMouse is described in U.S. Pat. No. 6,162,963, which is herein incorporated in its entirety by reference. Antibodies may also be produced by selection of combinatorial libraries of immunoglobulins, as disclosed for instance in (Ward et al. Nature, 341 (1989) p. 544, the entire disclosure of which is herein incorporated by reference). Phage display technology (McCafferty et al (1990) Nature 348:552-553) can be used to produce antibodies from immunoglobulin variable (V) domain gene repertoires from unimmunized donors. See, e.g., Griffith et al (1993) EMBO J. 12:725-734; U.S. Pat. Nos. 5,565,332; 5,573,905; 5,567,610; and 5,229,275). When combinatorial libraries comprise variable (V) domain gene repertoires of human origin, selection from combinatorial libraries will yield human antibodies.

[0232] In any embodiment, an antigen binding domain can be obtained from a humanized antibody in which residues from a complementary-determining region (CDR) of a human antibody are replaced by residues from a CDR of the original antibody (the parent or donor antibody, e.g. a murine or rat antibody) while maintaining the desired specificity, affinity, and capacity of the original antibody. The CDRs of the parent antibody, some or all of which are encoded by nucleic acids originating in a non-human organism, are grafted in whole or in part into the beta-sheet framework of a human antibody variable region to create an antibody, the specificity of which is determined by the engrafted CDRs. The creation of such antibodies is described in, e.g., WO 92/11018, Jones, 1986, Nature 321:522-525, Verhoeyen et al., 1988, Science 239:1534-1536. An antigen binding domain can thus have non-human hypervariable regions or CDRs and human frameworks region sequences (optionally with back mutations).

[0233] Additionally, a wide range of antibodies are available in the scientific and patent literature, including DNA and/or amino acid sequences, or from commercial suppliers. Antibodies will typically be directed to a pre-determined antigen. Examples of antibodies include antibodies that recognize an antigen expressed by a target cell that is to be eliminated, for example a proliferating cell or a cell contributing to a disease pathology. Examples include antibodies that recognize tumor antigens, microbial (e.g. bacterial or parasite) antigens or viral antigens.

[0234] Alternatively, antigen binding domains used in the proteins described herein can be readily derived from any of a variety of non-immunoglobulin scaffolds, for example affibodies based on the Z-domain of staphylococcal protein A, engineered Kunitz domains, monobodies or adnectins based on the 10th extracellular domain of human fibronectin III, anticalins derived from lipocalins, DARPins® (designed ankyrin repeat domains, multimerized LDLR-A module, avimers or cysteine-rich knottin peptides. See, e.g., Gebauer and Skerra (2009) Current Opinion in Chemical Biology 13:245-255, the disclosure of which is incorporated herein by reference.

[0235] As further exemplified herein, an antigen binding domain can conveniently comprise a VH and a VL (a VH/VL pair). In some embodiments, the VH/VL pair can be integrated in a Fab structure further comprising a CH1 and CL domain (a CH1/CL pair). A VH/VL pair refers to one VH and one VL domain that associate with one another to form an antigen binding domain. A CH1/CL pair refers to one CH1 and one CL domain bound to one another by covalent or non-covalent interactions, preferably non-covalent interactions, thus forming a heterodimer (e.g., within a protein such as a heterotrimer, heterotetramer, heteropentamer that can comprise one or more further polypeptide chains). The constant chain domains forming the pair can be present on the same or on different polypeptide chain, in any suitable combination.

[0236] Exemplary CDRs or VH and VL domains that bind NKp46 can be derived from the anti-NKp46 antibodies provided herein (see section “NKp46 variable region and CDR sequences”), or can be selected from any of the CDRs, VH and VL domains of PCT publication nos. WO2016/207278 and WO2017/114694, the disclosure of which are incorporated herein by reference. Variable regions can be used directly, or can be modified by selecting hypervariable or CDR regions from the NKp46 antibodies and placing them into the desired V_{L} or V_{H} framework, for example human frameworks. Antigen binding domains that bind NKp46 can also be derived de novo using methods for generating antibodies. Antibodies can be tested for binding to NKp46 polypeptides. In one aspect of any embodiment herein, a polypeptide (e.g. multispecific protein) that binds to NKp46 will be capable of binding NKp46 expressed on the surface of a cell, e.g. native NKp46 expressed by a NK cell.

[0237] Antigen binding domains (ABDs) that bind an antigen of interest can be selected based on the desired predetermined antigen of interest (e.g. an antigen other than NKp46), and may include for example cancer antigens such as antigens present on tumor cells and/or on immune cells capable of mediating a pro-tumoral effect, e.g. a monocyte or a macrophage, optionally a suppressor T cell, regulatory T cell, or myeloid-derived suppressor cell (for the treatment of cancer); bacterial or viral antigens (for the treatment of infectious disease); or antigens present on pro-inflammatory immune cells, e.g. T cells, neutrophils, macrophages, etc. (for the treatment of inflammatory and/or autoimmune disorder).

[0238] As used herein, the term “bacterial antigen” includes, but is not limited to, intact, attenuated or killed bacteria, any structural or functional bacterial protein or carbohydrate, or any peptide portion of a bacterial protein of sufficient length (typically about 8 amino acids or longer) to be antigenic. Examples include gram-positive bacterial antigens and gram-negative bacterial antigens. In some embodiments the bacterial antigen is derived from a bacterium selected from the group consisting of Helicobacter species, in particular Helicobacter pyloris; Borrelia species, in particular Borrelia burgdorferi; Legionella species, in particular Legionella pneumophilia; Mycobacteria s species, in particular M. tuberculosis, M. avium, M. intracellulare, M. kansasii, M. gordonae; Staphylococcus species, in particular Staphylococcus aureus; Neisseria species, in particular N. gonorrhoeae, N. meningitidis; Listeria species, in particular Listeria monocytogenes; Streptococcus species, in particular S. pyogenes, S. agalactiae; S. faecalis; S. bovis, S. pneumoniae; anaerobic Streptococcus species; pathogenic Campylobacter species; Enterococcus species; Haemophilus species, in particular Haemophilus influenzae; Bacillus species, in particular Bacillus anthracis; Corynebacterium species, in particular Corynebacterium diphtheriae; Erysipelothrix species, in particular Erysipelothrix rhusiopathiae; Clostridium species, in particular C. perfringens, C. tetani; Enterobacter species, in particular Enterobacter aerogenes, Klebsiella species, in particular Klebsiella 1S pneumoniae, Pasteurella species, in particular Pasteurella multocida, Bacteroides species; Fusobacterium species, in particular Fusobacterium nucleatum; Streptobacillus species, in particular Streptobacillus moniliformis; Treponema species, in particular Treponema pertenue; Leptospira; pathogenic Escherichia species; and Actinomyces species, in particular Actinomyces israeli.

[0239] As used herein, the term “viral antigen” includes, but is not limited to, intact, attenuated or killed whole virus, any structural or functional viral protein, or any peptide portion of a viral protein of sufficient length (typically about 8 amino acids or longer) to be antigenic. Sources of a viral antigen include, but are not limited to viruses from the families: Retroviridae (e.g., human immunodeficiency viruses, such as HIV-1 (also referred to as HTLV-III, LAV or HTLV-III/LAV, or HIV-III; and other isolates, such as HIV-LP; Picornaviridae (e.g., polio viruses, hepatitis A virus; enteroviruses, human Coxsackie viruses, rhinoviruses, echoviruses); Calciviridae (e.g., strains that cause gastroenteritis); Togaviridae (e.g., equine encephalitis viruses, rubella viruses); Flaviviridae (e.g., dengue viruses, encephalitis viruses, yellow fever viruses); Coronaviridae (e.g., coronaviruses); Rhabdoviridae (e.g., vesicular stomatitis viruses, rabies viruses); Filoviridae (e.g., Ebola viruses); Paramyxoviridae (e.g., parainfluenza viruses, mumps virus, measles virus, respiratory syncytial virus); Orthomyxoviridae (e.g., influenza viruses); Bunyaviridae (e.g., Hantaan viruses, bunya viruses, phleboviruses and Nairo viruses); Arenaviridae (hemorrhagic fever viruses); Reoviridae (e.g., reoviruses, orbiviruses and rotaviruses); Bornaviridae; Hepadnaviridae (Hepatitis B virus); Parvoviridae (parvoviruses); Papovaviridae (papilloma viruses, polyoma viruses); Adenoviridae (most adenoviruses); Herpesviridae (herpes simplex virus (HSV) 1 and 2, varicella zoster virus, cytomegalovirus (CMV), herpes virus; Poxviridae (variola viruses, vaccinia viruses, pox viruses); and Iridoviridae (e.g., African swine fever virus); and unclassified viruses (e.g., the agent of delta hepatitis (thought to be a defective satellite of hepatitis B virus), Hepatitis C; Norwalk and related viruses, and astroviruses). Alternatively, a viral antigen may be produced recombinantly.

[0240] As used herein, the terms “cancer antigen” and “tumor antigen” are used interchangeably and refer to antigens (other than the cytokine receptor expressed on NK cells, NKp46, and CD16) that are differentially expressed by cancer cells or are expressed by non-tumoral cells (e.g. immune cells) having a pro-tumoral effect (e.g. an immunosuppressive effect), and can thereby be exploited in order to target cancer cells. Cancer antigens can be antigens which can potentially stimulate apparently tumor-specific immune responses. Some of these antigens are encoded, although not necessarily expressed, or expressed at lower levels or less frequently, by normal cells. These antigens can be characterized as those which are normally silent (i.e., not expressed) in normal cells, those that are expressed only at certain stages of differentiation and those that are temporally expressed such as embryonic and fetal antigens. Other cancer antigens are encoded by mutant cellular genes, such as oncogenes (e.g., activated ras oncogene), suppressor genes (e.g., mutant p53), fusion proteins resulting from internal deletions or chromosomal translocations. Still other cancer antigens can be encoded by viral genes such as those carried on RNA and DNA tumor viruses. Still other cancer antigens can be expressed on immune cells capable of contributing to or mediating a pro-tumoral effect, e.g. cell that contributes to immune evasion, a monocyte or a macrophage, optionally a suppressor T cell, regulatory T cell, or myeloid-derived suppressor cell.

[0241] The cancer antigens are usually normal cell surface antigens which are either over-expressed or expressed at abnormal times, or are expressed by a targeted population of cells. Ideally the target antigen is expressed only on proliferative cells (e.g., tumor cells) or pro-tumoral cells (e.g. immune cells having an immunosuppressive effect), however this is rarely observed in practice. As a result, target antigens are in many cases selected on the basis of differential expression between proliferative/disease tissue and healthy tissue. Example of cancer antigens include: Receptor Tyrosine Kinase-like Orphan Receptor 1 (ROR1), Crypto, CD4, CD19, CD20, CD30, CD38, CD47, Glycoprotein NMB, CanAg, Her2 (ErbB2/Neu), a Siglec family member, for example CD22 (Siglec2) or CD33 (Siglec3), CD79, CD123, CD138, CD171, PSCA, L1-CAM, PSMA (prostate specific membrane antigen), BCMA, CD52, CD56, CD80, CD70, E-selectin, EphB2, Melanotransferrin, Mud 6 and TMEFF2. Examples of cancer antigens also include Immunoglobulin superfamily (IgSF) such as cytokine receptors, Killer-Ig Like Receptor, CD28 family proteins, for example, Killer-Ig Like Receptor 3DL2 (KIR3DL2), B7-H3, B7-H4, B7-H6, PD-L1. Examples also include MAGE, MART-1/Melan-A, gp100, major histocompatibility complex class I-related chain A and B polypeptides (MICA and MICB), HLA-G, adenosine deaminase-binding protein (ADAbp), cyclophilin b, colorectal associated antigen (CRC)-C017-1A/GA733, protein tyrosine kinase 7 (PTK7), receptor protein tyrosine kinase 3 (TYRO-3), nectins (e.g. nectin-4), major histocompatibility complex class I-related chain A and B polypeptides (MICA and MICB), proteins of the UL16-binding protein (ULBP) family, proteins of the retinoic acid early transcript-1 (RAET1) family, carcinoembryonic antigen (CEA) and its immunogenic epitopes CAP-1 and CAP-2, etv6, aml1, prostate specific antigen (PSA), T-cell receptor/CD3-zeta chain, MAGE-family of tumor antigens, GAGE-family of tumor antigens, anti-Müllerian hormone Type II receptor, delta-like ligand 4 (DLL4), DR5, ROR1 (also known as Receptor Tyrosine Kinase-Like Orphan Receptor 1 or NTRKR1 (EC 2.7.10.1), BAGE, RAGE, LAGE-1, NAG, GnT-V, MUM-1, CDK4, MUC family, VEGF, VEGF receptors, Angiopoietin-2, PDGF, TGF-alpha, EGF, EGF receptor, members of the human EGF-like receptor family, e.g., HER-2/neu, HER-3, HER-4 or a heterodimeric receptor comprised of at least one HER subunit, gastrin releasing peptide receptor antigen, Muc-1, CA125, integrin receptors, αvß3 integrins, α5ß1 integrins, αIIbß3-integrins, PDGF beta receptor, SVE-cadherin, hCG, CSF1R (tumor-associated monocytes and macrophages), α-fetoprotein, E-cadherin, α-catenin, β-catenin and γ-catenin, p120ctn, PRAME, NY-ESO-1, cdc27, adenomatous polyposis coli protein (APC), fodrin, Connexin 37, Ig-idiotype, p15, gp75, GM2 and GD2 gangliosides, viral products such as human papillomavirus proteins, imp-1, P1A, EBV-encoded nuclear antigen (EBNA)-1, brain glycogen phosphorylase, SSX-1, SSX-2 (HOM-MEL-40), SSX-1, SSX-4, SSX-5, SCP-1 and CT-7, and c-erbB-2, although this is not intended to be exhaustive.

[0242] Optionally, a multispecific protein can be specified as excluding or not requiring a stromal modifying moiety, e.g., a moiety capable of altering or degrading a component of, the stroma such as an ECM component, e.g., a glycosaminoglycan, e.g., hyaluronan (also known as hyaluronic acid or HA), chondroitin sulfate, chondroitin, dermatan sulfate, heparin sulfate, heparin, entactin, tenascin, aggrecan and keratin sulfate; or an extracellular protein, e.g., collagen, laminin, elastin, fibrinogen, fibronectin, and vitronectin. For example, the stromal modifying moiety can be a hyaluronan degrading enzyme, an agent that inhibits hyaluronan synthesis, or an antibody molecule against hyaluronic acid. Optionally, a multispecific protein can be specified as excluding a mesothelin targeting moiety or mesothelin-binding ABD.

[0243] Optionally, a multispecific protein can be specified as excluding a PD-L1 targeting moiety, a HER3 targeting moiety, an IGFIR targeting moiety or a hyaluronidase 1 targeting moiety, or a combination a stroma targeting moiety or ABD and a cancer-antigen targeting moiety.

[0244] Optionally a cancer antigen or antigen of interest can be specified as being other than a PD-L1, a HER3, an IGFIR or hyaluronidase 1.

[0245] By way of examples, when the ABD that binds an antigen of interest binds to a HER2 polypeptide, exemplary VH and VL pairs can be selected from antibodies trastuzumab, pertuzumab or margetuximab:

(SEQ ID NO: 132)
Trastuzumab heavy chain variable region
EVQLVESGGG LVQPGGSLRL SCAASGFNIK DTYIHWVRQA
PGKGLEWVAR IYPTNGYTRY ADSVKGRFTI SADTSKNTAY
LQMNSLRAED TAVYYCSRWG GDGFYAMDYW GQGTLVTVSS.
(SEQ ID NO: 133)
Trastuzumab light chain variable region
[sequence omitted]
Margetuximab VH:
(SEQ ID NO: 134)
QVQLQQSGPE LVKPGASLKL SCTASGFNIK DTYIHWVKQR
PEQGLEWIGRIYPTNGYTRY DPKFQDKATI TADTSSNTAYL
QVSRLTSED TAVYYCSRWG GDGFYAMDYW GQGASVTVSS.
Margetuximab VL:
(SEQ ID NO: 135)
DIVMTQSHKF MSTSVGDRVS ITCKASQDVN TAVAWYQQKP
GHSPKLLIYS ASFRYTGVPD RFTGSRSGTD FTFTISSVQA
EDLAVYYCQQ HYTTPPTFGG GTKVEIK.

[0246] In another example, when the ABD that binds an antigen of interest binds to a CD19 polypeptide, exemplary VH and VL pairs can be selected from the VH and VL pair from blinatumomab.

Blinatumomab VH:
(SEQ ID NO: 136)
QVQLQQSGAELVRPGSSVKISCKASGYAFSSYWMNWVKQRPGQGLEWIGQ
IWPGDGDTNYNGKFKGKATLTADESSSTAYMQLSSLASEDSAVYFCARRE
TTTVGRYYYAMDYWGQGTTVTVSS.
Blinatumomab VL:
(SEQ ID NO: 137)
DIQLTQSPASLAVSLGQRATISCKASQSVDYDGDSYLNWYQQIPGQPPKL
LIYDASNLVSGIPPRFSGSGSGTDFTLNIHPVEKVDAATYHCQQSTEDPW
TFGGGTKLEIK.

[0247] In another example, when the ABD that binds an antigen of interest binds to a CD20 polypeptide, exemplary VH and VL pairs can be selected from VH and VL pair from rituximab and obinutuzumab:

### Rituximab VH:

(SEQ ID NO: 138)
[sequence omitted]
Rituximab VL:
(SEQ ID NO: 139)
[sequence omitted]
Obinutuzumab VH:
(SEQ ID NO: 140)
QVQLVQSGAEVKKPGSSVKVSCKASGYAFSYSWINWVRQAPGQGL
EWMGRIFPGDGDTDYNGKFKGRVTITADKSTSTAYMELSSLRSED
TAVYYCARNVFDGYWLVYWGQGTLVTVSS.
Obinutuzumab VL:
(SEQ ID NO: 141)
DIVMTQTPLSLPVTPGEPASISCRSSKSLLHSNGITYLYWYLQKP
GQSPQLLIYQMSNLVSGVPDRFSGSGSGTDFTLKISRVEAEDVGV
YYCAQNLELPYTFGGGTKVEIK.

[0249] In another example, when the ABD that binds an antigen of interest binds to a EGFR polypeptide, exemplary VH and VL pairs can be selected from the EGFR-binding VH and VL pair from cetuximab, panitumumab, nimotuzumab, depatuxizumab and necitumumab:

Cetuximab VH:
(SEQ ID NO: 142)
QVQLKQSGPGLVQPSQSLSITCTVSGFSLTNYGVHWVRQSPGKGLEWLGV
IWSGGNTDYNTPFTSRLSINKDNSKSQVFFKMNSLQSNDTAIYYCARALT
YYDYEFAYWGQGTLVTVSA.
Cetuximab VL:
(SEQ ID NO: 143)
DILLTQSPVILSVSPGERVSFSCRASQSIGTNIHWYQQRTNGSPRLLIKY
ASESISGIPSRFSGSGSGTDFTLSINSVESEDIADYYCQQNNNWPTTFGA
GTKLELK.
Panitumumab VH:
(SEQ ID NO: 144)
[sequence omitted]
Panitumumab VL:
(SEQ ID NO: 145)
DIQMTQSPSSLSASVGDRVTITCQASQDISNYLNWYQQKPGKAPKLLIYD
ASNLETGVPSRFSGSGSGTDFTFTISSLQPEDIATYFCQHFDHLPLAFGG
GTKVEIK.
Nimotuzumab VH:
(SEQ ID NO: 146)
[sequence omitted]
Nimotuzumab VL:
(SEQ ID NO: 147)
DIQMTQSPSSLSASVGDRVTITCRSSQNIVHSNGNTYLDWYQQTPGKAPK
LLIYKVSNRFSGVPSRFSGSGSGTDFTFTISSLQPEDIATYYCFQYSHVP
WTFGQGTKLQI.
Necitumumab VH:
(SEQ ID NO: 148)
[sequence omitted]
Necitumumab VL:
(SEQ ID NO: 149)
EIVMTQSPATLSLSPGERATLSCRASQSVSSYLAWYQQKPGQAPRLLIYD
ASNRATGIPARFSGSGSGTDFTLTISSLEPEDFAVYYCHQYGSTPLTFGG
GTKAEIK.
Depatuxizumab VH:
(SEQ ID NO: 150)
QVQLQESGPGLVKPSQTLSLTCTVSGYSISSDFAWNWIRQPPGKGLEWMG
YISYSGNTRYQPSLKSRITISRDTSKNQFFLKLNSVTAADTATYYCVTAG
RGFPYWGQGTLVTVSS.
Depatuxizumab VL:
(SEQ ID NO: 151)
DIQMTQSPSSMSVSVGDRVTITCHSSQDINSNIGWLQQKPGKSFKGLIYH
GTNLDDGVPSRFSGSGSGTDYTLTISSLQPEDFATYYCVQYAQFPWTFGG
GTKLEIK.

[0250] In another example, when the ABD that binds an antigen of interest binds to a BCMA polypeptide, exemplary VH and VL pairs can be selected from the BCMA-binding VH and VL pair from belantamab, teclistamab, elranatamab or pavurutamab:

Belantamab VH:
(SEQ ID NO: 152)
QVQLVQSGAEVKKPGSSVKVSCKASGGTFSNYWMHWVRQAPGQGLEWMGA
TYRGHSDTYYNQKFKGRVTITADKSTSTAYMELSSLRSEDTAVYYCARGA
IYDGYDVLDNWGQGTLVTVSS.
Belantamab VL:
(SEQ ID NO: 153)
DIQMTQSPSSLSASVGDRVTITCSASQDISNYLNWYQQKPGKAPKLLIYY
TSNLHSGVPSRFSGSGSGTDFTLTISSLQPEDFATYYCQQYRKLPWTFGQ
GTKLEIK.
Pavurutamab VH:
(SEQ ID NO: 154)
QVQLVQSGAEVKKPGASVKVSCKASGYTFTNHIIHWVRQAPGQCLEWMGY
INPYPGYHAYNEKFQGRATMTSDTSTSTVYMELSSLRSEDTAVYYCARDG
YYRDTDVLDYWGQGTLVTVSS.
Pavurutamab VL:
(SEQ ID NO: 155)
DIQMTQSPSSLSASVGDRVTITCQASQDISNYLNWYQQKPGKAPKLLIYY
TSRLHTGVPSRFSGSGSGTDFTFTISSLEPEDIATYYCQQGNTLPWTFGC
GTKVEIK.

[0251] In another example, when the ABD that binds an antigen of interest binds to a PD-L1 polypeptide, exemplary VH and VL pairs can be selected from the PD-L1-binding VH and VL pair from antibodies 3G10, 12A4, 10A5, 5F8, 10H10, 1B12, 7H1, 11E6, 12B7, and 13G4 shown in U.S. Pat. No. 7,943,743, the disclosure of which is incorporated herein by reference, or of any of the antibodies MPDL3280A (atezolizumab, Tecentriq™, see, e.g., U.S. Pat. No. 8,217,149, anti-PD-L1 from Roche/Genentech), MDX-1105 (anti-PD-L1 from Bristol-Myers Squibb), MSB0010718C (avelumab; anti-PD-L1 from Pfizer) and MED14736 (durvalumab; anti-PD-L₁ from AstraZeneca).

[0252] In another example, when the ABD that binds an antigen of interest binds to a B7-H3 polypeptide, exemplary VH and VL pairs can be selected from the B7-H3-binding VH and VL pairs of enoblituzumab, of TRL4542 shown in PCT publication no. WO2018/129090, of 8H9 shown in PCT publication no. WO2018/209346, or of any of the antibodies of PCT publication nos. WO2016/106004, WO2017/180813, WO2019/024911, WO2019/225787, WO2020/063673, WO2020/094120, WO2020/102779, WO2020/140094 and WO2020/151384. Examples of single domain B7H3 ABDs that can be used include Affibody™ formats described in PCT publication WO2020/041626 and single domain antibodies (sdAb) of PCT publication nos. WO2020/076970 and WO2021/247794. The disclosures of VH, VL and CDRs sequences of the above are incorporated herein by reference.

[0253] In another example, when the ABD that binds an antigen of interest binds to a B7-H6 polypeptide, exemplary VH and VL pairs can be selected from the B7-H6-binding VH and VL pairs shown in U.S. Pat. Nos. 11,034,766; 8,822,652; 9,676,855; 11,034,766; 11,034,767 or in PCT publication nos. WO2013/037727 or WO2021/064137.

[0254] In another example, when the ABD that binds an antigen of interest binds to a B7-H4 polypeptide, exemplary VH and VL pairs can be selected from the B7-H4-binding VH and VL of alsevalimab or the VH and VL pairs shown in U.S. Pat. Nos. 10,626,176; 9,676,854; 9,574,000; 10,150,813; 10,814,011 or in PCT publication nos. WO2009/073533, WO2019/165077, WO2019/169212, WO2019/147670, WO2021/155307, WO2022/039490, WO2019/154315 or WO2021/185934.

[0255] In one embodiment, the ABD that binds an antigen of interest binds to a cancer antigen, a viral antigen, a microbial antigen, or an antigen present on an infected cell (e.g. virally infected) or on a pro-inflammatory immune cell. In one embodiment, said antigen is a polypeptide selectively expressed or overexpressed on a tumor cell, and infected cell or a pro-inflammatory cell. In one embodiment, said antigen is a polypeptide that when inhibited, decreases the proliferation and/or survival of a tumor cell, an infected cell or a pro-inflammatory cell.

[0256] The ABDs which are incorporated into the polypeptides can be tested for any desired activity prior to inclusion in a multispecific NKp46-binding protein, for example the ABD can be tested in a suitable format (e.g. as conventional IgG antibody, fab, Fab′2 or scFv) for binding to (e.g. binding affinity) for its binding partner.

[0257] An ABD derived from an antibody will generally comprise at minimum a hypervariable region sufficient to confer binding activity. It will be appreciated that an ABD may comprise other amino acids or functional domains as may be desired, including but not limited to linker elements (e.g. linker peptides, CH1, Cκ or Cλ domains, hinges, or fragments thereof). In one example an ABD comprises a scFv, a V_{H} domain and a V_{L} domain, or a single domain antibody (nanobody or dAb) such as a V-NAR domain or a V_{H}H domain. ABDs can be made of a V_{H} and a V_{L} domain that associate with one another to form the ABD.

[0258] In one embodiment, one or both of the V_{H} and V_{L} pairs that form an ABD for NKp46 and antigen of interest are within a tandem variable region (a V_{H} and V_{L} domain separated by a flexible polypeptide linker), such as an scFv.

[0259] In one embodiment, one or both ABDs for NKp46 and antigen of interest can have a conventional or non-conventional Fab structure. A Fab structure can be characterized as a VH or VL variable domain linked to a CH1 domain and a complementary variable domain (VL or VH, respectively) linked to a complementary Cκ (or Cλ) constant domain, wherein the CH1 and Cκ (or Cλ) constant domains associate (dimerize). For example a Fab can be formed from a VH-CH1 unit (VH fused to a CH1) on a first polypeptide chain that dimerizes with a VL-Cκ unit (VL fused to a Cκ) on a second chain. Alternatively, a Fab can be formed from a VH-Cκ unit (VH fused to a Cκ) on a first polypeptide chain that dimerizes with a VL-CH1 unit (VL fused to a CH1) on a second chain.

[0260] In some embodiments, one of the ABDs for NKp46 and antigen of interest comprises a Fab structure, in which a variable domain is linked to a CH1 domain and a complementary variable domain is linked to a complementary Cκ (or Cλ) constant domain, wherein the CH1 and Cκ (or Cλ) constant domains associate to form a heterodimeric protein, and the other ABD comprise or consists of an scFv or a single binding domain (e.g. VhH domain, Affibody™, DARPin). The scFv or a single binding domain can optionally be fused to a Cκ or CA domain or hinge domain.

[0261] The CH1 and/or Cκ domains can then be linked to a CH2 domain, optionally in each case via a hinge region (or a suitable domain linker). The CH2 domain(s) is/are then linked to a CH3 domain. The CH2-CH3 domains can thus optionally be embodied as a full-length Fc domain (optionally a full-length Fc domain, except that the CH3 domain that lacks the C-terminal lysine).

[0262] The CD16 ABD, when present, can readily be embodied as a Fc domain dimer that is capable of binding to human CD16A and optionally other Fcγ receptors, e.g., CD16B, CD32A, CD32B and/or CD64). In one embodiment, an Fc moiety may be obtained by production of the polypeptide in a host cell or by a process that yields N297-linked glycosylation, e.g. a mammalian cell. In one embodiment, an Fc moiety comprises a human gamma isotype constant region comprising one or more amino acid modifications, e.g. in the CH2 domain, that increases binding to CD16 or CD16A.

[0263] Alternatively, the CD16A ABD, when present, can comprise the amino acid sequences of the CD16A-binding VH and VL pair of SEQ ID NOS: 504 and 505, or of the CD16A-binding VH and VL pair of SEQ ID NOS: 506 and 507, or can comprise the heavy and light chain Kabat CDRs thereof. Yet further, the alternatively, the CD16A ABD, when present, can be embodied as a CD16A-binding single VH domain (see, e.g., Genbank accession no. ABQ52435; Behar et al., (2008) Protein Eng Des Sel. (1):1-10) having the amino acid sequence shown in SEQ ID NO: 508.

[0264] The cytokine receptor antigen binding domain can readily be embodied as a cytokine, (e.g. a type 1 cytokine such as an IL-2, IL-15, IL-21, IL-7, IL-27 or IL-12 cytokine, an IL-18 cytokine or a type 1 interferon such as IFN-α or IFN-β). Exemplary cytokine receptor ABDs and modified cytokines are further described herein.

[0265] Once appropriate antigen binding domains having desired specificity and/or activity are identified, nucleic acids encoding each of the or ABD can be separately placed, in suitable arrangements, in an appropriate expression vector or set of vectors, together with DNA encoding any elements such as CH1, CK, CH2 and CH3 domains or portions thereof, mutant IL2 polypeptides and any other optional elements (e.g. DNA encoding a hinge-derived or linker elements) for transfection into an appropriate host. ABDs will be arranged in an expression vector, or in separate vectors as a function of which type of polypeptide is to be produced, so as to produce the Fc-polypeptides having the desired domains operably linked to one another. The host is then used for the recombinant production of the multispecific polypeptide.

[0266] For example, a polypeptide fusion product can be produced from a vector in which one ABD or a part thereof (e.g. a VH, VL or a VH/VL pair) is operably linked (e.g. directly, or via a CH1, Cκ or Cλ constant region and/or hinge region) to the N-terminus of a CH2 domain, and the CH2 domain is operably linked at its C-terminus to the N-terminus a CH3 domain. Another ABD or part thereof can be on a second polypeptide chain that forms a dimer, e.g. heterodimer, with the polypeptide comprising the first ABD.

[0267] The multispecific polypeptide can then be produced in an appropriate host cell or by any suitable synthetic process. A host cell chosen for expression of the multispecific polypeptide is an important contributor to the final composition, including, without limitation, the variation in composition of the oligosaccharide moieties decorating the protein in the immunoglobulin CH2 domain. Thus, one aspect of the invention involves the selection of appropriate host cells for use and/or development of a production cell expressing the desired therapeutic protein such that the multispecific polypeptide retains FcRn and CD16 binding. The host cell may be of mammalian origin or may be selected from COS-1, COS-7, HEK293, BHK21, CHO, BSC-1, Hep G2, 653, SP2/0, 293, HeLa, myeloma, lymphoma, yeast, insect or plant cells, or any derivative, immortalized or transformed cell thereof. The host cell may be any suitable species or organism capable of producing N-linked glycosylated polypeptides, e.g. a mammalian host cell capable of producing human or rodent IgG type N-linked glycosylation.

[0268] Protein Formats

[0269] Multimeric, multispecific proteins such as heterodimers, heterotrimers and hetero-tetramers can be produced according to a variety of formats. Different domains onto different polypeptide chain that associate to form a multimeric protein. Accordingly, a wide range of protein formats can be constructed around Fc domain dimers that are capable of binding to human FcRn polypeptide (neonatal Fc receptor), with or without additionally binding to CD16 or CD16A and optionally other Fcγ receptors, e.g., CD16B, CD32A, CD32B and/or CD64), depending on whether or not the CD16 binding ABD is desired to be present. As shown herein, greatest potentiation of NK cell cytotoxicity can be obtained through use of Fc moieties that have substantial binding to the activating human CD16 receptor (CD16A) binding; such CD16 binding can be obtained through the use of suitable CH2 and/or CH3 domains, as further described herein. In one embodiment, an Fc moiety is derived from a human IgG1 isotype constant region. Use of modified CH3 domains also contributes to the possibility of use a wide range of heteromultimeric protein structures. Accordingly, a protein comprises a first and a second polypeptide chain each comprising a variable domain fused to a human Fc domain monomer (i.e. a CH2-CH3 unit), optionally a Fc domain monomer comprising a CH3 domain capable of undergoing preferential CH3-CH3 hetero-dimerization, wherein the first and second chain associate via CH3-CH3 dimerization and the protein consequently comprises a Fc domain dimer. The variable domains of each chain can be part of the same or different antigen binding domains.

[0270] Multispecific proteins can thus be conveniently constructed using VH and VL pairs arranged as scFv or Fab structures, together with CH1 domains, CL domain, Fc domains and cytokines, and domain linkers. Preferably, the proteins will use minimal non-natural sequences, e.g. minimal use of non-Ig linkers, optionally no more than 5, 4, 3, 2 or 1 domain linker(s) that is not an antibody-derived sequence, optionally wherein domain linker(s) are no more than 15, 10 or 5 amino acid residues in length. In one embodiment, the CD16 ABD is a Fc domain dimer. Fc domain dimerFc domain dimer.

[0271] In some embodiment, the multispecific proteins (e.g. dimers, trimers, tetramers) may comprise a domain arrangement of any of the following in which domains can be placed on any of the 2, 3 or 4 polypeptide chains, wherein the NKp46 ABD is interposed between the Fc domain and the cytokine receptor ABD (e.g. the protein has a terminal or distal cytokine receptor ABD at the C-terminal end and a terminal or distal antigen of interest (Antigen) ABD at the topological N-terminal end), wherein the NKp46 ABD is connected to one of the polypeptide chains of the Fc domain dimer via a hinge polypeptide or a flexible linker, and wherein the ABD that binds the cytokine receptor is connected to NKp46 ABD (e.g. to one of the polypeptide chains thereof when the NKp46 ABD is contained on two chains) via a flexible linker (e.g. a linker comprising G and S residues), wherein “n” is 1 or 2:

(Anti-Antigen ABD)ₙ-(Fc domain dimer)-(NKp46ABD)-(cytokine receptor ABD).

[0272] The cytokine receptor ABD can be an IL2, IL15, IL18, IL21 or IFN-α polypeptide. The Fc domain can be specified to be a Fc domain dimer (e.g. that binds human FcRn and/or Fcγ receptors). In one embodiment, one or both of the antigen of interest (e.g. cancer antigen) ABD and NKp46 ABD is formed from two variable regions present within tandem variable regions, wherein the variable regions that associate to form a particular ABD can be on the same polypeptide chain or on different polypeptide chains. In another embodiment, one or both of the antigen of interest ABD and NKp46 ABD comprises a tandem variable region and the other comprises a Fab structure. In another embodiment, both of the antigen of interest and NKp46 ABD comprises a Fab structure. In another embodiment one of the antigen of interest and NKp46 ABD comprises a Fab structure and the other comprises an scFv structure.

[0273] Heterodimers and Heterotrimers

[0274] The present disclosure provides advantageous approaches of making multimeric multispecific proteins which bind to the antigen of interest (monovalently or bivalently) and monovalently to each of NKp46, CD16A and cytokine receptor. The approaches readily allow domain configurations where the NKp46 ABD is positioned between the Fc domain and a cytokine polypeptide. These configurations can be achieved through the assembly of different polypeptide chains described herein that each comprise at least one heavy or light chain variable domain fused to a human CH1 or Cκ constant domain (a V-(CH1/Cκ) unit), wherein the protein chains undergo CH1-Cκ dimerization and are bound to one another by non-covalent interactions and optionally further disulfide bonds formed between respective CH1 and Cκ domains.

[0275] Exemplary heterodimeric or heterotrimeric polypeptides have an NKp46 binding ABD, an antigen of interest binding ABD, a cytokine receptor-binding ABD (e.g. IL-2, IL-15, IL-21, IL-7, IL-27, IL-12, IL-18, IFN-α or IFN-β polypeptide) and a Fc domain dimer can optionally be produced as one or more chains that each associate with a central chain, e.g. by CH1-Cκ heterodimerization and/or by CH3-CH3 dimerization. Different variants can be produced, as illustrated in the Examples herein.

[0276] In one embodiment, an isolated or purified heterodimeric or heterotrimeric protein comprises at least two or three polypeptide chains, each comprising a V-(CH1/Cκ) unit, whereby the chains are bound to one another by non-covalent interactions and optionally further bound via disulfide bonds between CH1 and Cκ domains, and still further optionally, whereby the chains are bound by non-covalent interactions between the respective variable regions, CH1 and Cκ domains, and CH3 domains of the Fc portion.

[0277] In one example, the protein comprises a first and a second polypeptide chain each comprising a variable domain fused to a CH1 or Cκ domain (a V-(CH1/Cκ) unit), in turn fused at its C-terminus to a human Fc domain monomer comprising a CH2 domain and a CH3 domain capable of undergoing CH3-CH3 dimerization, wherein the first and second chain associate via CH1-Cκ and CH3-CH3 dimerization such that the protein comprises a Fc domain dimer. The variable domains of each chain can be part of the same or different antigen binding domains.

[0278] The variable and constant regions can be selected and configured such that each chain will preferentially associate with its desired complementary partner chain. The resulting multimeric protein can be produced reliably and with high productivity using conventional production methods using recombinant host cells. The choice of which V_{H} or V_{L} to associate with a CH1 and Cκ in a unit is based on affinity between the units to be paired so as to drive the formation of the desired multimer. The resulting multimer will be bound by non-covalent interactions between complementary V_{H} and V_{L} domains, by non-covalent interactions between complementary CH1 and Cκ domains, and optionally by further disulfide bonding between complementary CH1 and Cκ domains (and optionally further disulfide bonds between complementary hinge domains). V_{H}-V_{L} associations are stronger than V_{H}-V_{H} or V_{L}-V_{L}, consequently, as shown herein, one can place a V_{H} or a V_{L} next to either a CH1 or a Cκ, and the resulting V-C unit will partner preferably with its V-C counterpart. For example V_{H}-Cκ will pair with V_{L}-CH1 preferentially over V_{H}-CH1. Additionally, by including an Fc domain, preferred chain pairing is further improved, as the two Fc monomer-containing chains are bound by non-covalent interactions between CH3 domains of the Fc domain monomers. The different V-C combinations, optionally further combined with Fc pairing thereby provides tools to make heteromultimeric proteins comprising a cytokine (e.g. IL-2, IL-15, IL-21, IL-7, IL-27, IL-12, IL-18, IFN-α or IFN-β polypeptide), represented as “Cyt” in the domain arrangements.

[0279] In one example, the multispecific protein is a heterodimer comprising a first and a second polypeptide chain each comprising a variable domain fused to a CH1 or Cκ domain (a V-(CH1/Cκ) unit), in turn fused at its C-terminus to a human Fc domain monomer, wherein the V-(CH1/Cκ) unit of the first chain has undergone CH1-Cκ dimerization with the V-(CH1/Cκ) unit of the second chain thereby forming a first antigen binding domain (ABD₁) and a Fc domain dimer, wherein one of the polypeptide chains further comprises an antigen binding domain that forms a second antigen binding domain (ABD₂), and wherein the Fc domain dimer binds to a human CD16 polypeptide, wherein one of ABD₁ and ABD₂ binds NKp46 and the other binds the antigen of interest (e.g. tumor antigen).

[0280] In one example, the protein has a domain arrangement:

[chemical structure]

[0281] wherein Vₐ₋₁, V_{b-1}, Vₐ₋₂ and V_{b-2} are each a V_{H} domain or a V_{L} domain, and wherein one of Vₐ₋₁ and V_{b-1} is a V_{H} and the other is a V_{L} such that Vₐ₋₁ and V_{b-1} form a first antigen binding domain (ABD), wherein one of Vₐ₋₂ and V_{b-2} is a V_{H} and the other is a V_{L} such that Vₐ₋₂ and V_{b-2} form a second antigen binding domain, wherein one of the ABD binds NKp46 and the other binds an antigen of interest.

[0282] In other examples, the protein is a heterotrimer and comprises three polypeptide chains, each comprising a variable domain fused to a CH1 or Cκ domain (a V-(CH1/Cκ) unit), wherein a first (central) chain comprises two V-(CH1/Cκ) units and a human Fc domain interposed between the units, the second chain comprises one V-(CH1/Cκ) unit and a human Fc domain monomer, and the third chain comprises one V-(CH1/Cκ) unit and a cytokine polypeptide (Cyt), wherein one of the V-(CH1/Cκ) units of the central chain has undergone CH1-Cκ dimerization with the V-(CH1/Cκ) unit of the second chain thereby forming a first antigen binding domain (ABD₁) and a Fc domain dimer, and wherein the other of the V-(CH1/Cκ) units of the central chain has undergone CH1-Cκ dimerization with the V-(CH1/Cκ) unit of the third chain thereby forming a second antigen binding domain (ABD₂), and wherein the Fc domain binds to a human CD16 polypeptide. In one embodiment, the Fc domain comprises N-linked glycosylation at residue N297 (Kabat EU numbering).

[chemical structure]

[0283] In one example, the protein has a domain arrangement:

[chemical structure]

[0284] In another example, the protein has a domain arrangement:

[0285] In one specific example of the above heterotrimeric proteins, the Fab structure interposed between the Fc domain and the cytokine is the NKp46 binding ABD (i.e. the NKp46 binding ABD is interposed between the Fc domain and the C-terminal cytokine). The Fc domain in the first polypeptide is connected (e.g. fused) at its C terminus to the N-terminus of the VH domain via a linker. The constant domain (the CH1 or Cκ domain in the respective domain arrangements) in the third polypeptide is connected (e.g. fused) at its C terminus to the N-terminus of the cytokine polypeptide via a linker. Each constant domain (the CH1 or Cκ domain in the respective domain arrangements) that is N-terminal to the Fc domain is fused at the C terminus of the constant domain to the N-terminus of the Fc domain via a hinge region.

[0286] Optionally, any of the multispecific proteins of the invention may include CH1, CL or CH3 domains which comprise amino acid modifications (e.g. substitutions) to promote heterodimerization. For example, heterodimerization modifications often involve steric repulsion, charge steering interaction, or interchain disulfide bond formation, wherein the CH3 domain interface of the antibody Fc region is mutated to create altered charge polarity across the Fc dimer interface such that co-expression of electrostatically matched Fc chains supports favorable attractive interactions thereby promoting desired Fc heterodimer formation, whereas unfavorable repulsive charge interactions suppress unwanted Fc homodimer formation.

[0287] In one example, the first (central) polypeptide chain will provide one variable domain that will, together with a complementary variable domain on a second polypeptide chain, form a first antigen binding domain (e.g. the ABD that binds the antigen of interest), and an Fc domain. The first (central) polypeptide chain will also provide a second variable domain (e.g., placed on the opposite end of the interposed Fc domain from the first variable domain, at the C-terminus of the Fc domain) that will be paired with a complementary variable domain to form a second antigen binding domain (e.g. the ABD that binds NKp46); the variable domain that is complementary to the second variable domain can be placed on the central polypeptide (e.g. adjacent to the second variable domain in a tandem variable domain construct such as an scFv), or can be placed on a separate polypeptide chain, notably a third polypeptide chain. The second (and third, if present) polypeptide chains will associate with the central polypeptide chain by CH1-Cκ heterodimerization, forming non-covalent interactions and optionally further interchain disulfide bonds between complementary CH1 and Cκ domains (and optionally interchain disulfide bonds between hinge regions), with a primary multimeric polypeptide being formed so long as CH/CK and V_{H}/Vκ domains are chosen to give rise to a preferred dimerization configuration that results preferentially in the desired V_{H}-V_{L} pairings. Remaining unwanted pairings can remain minimal during production and/or are removed during purification steps. In a trimer, or when polypeptides are constructed for preparation of a trimer, there will generally be one polypeptide chain that comprises a non-naturally occurring VH-CK or VK-CH1 domain arrangement. A cytokine (e.g., IL-2, IL-15, IL-21, IL-7, IL-27, IL-12, IL-18, IFN-α or IFN-β) can then be placed at the C-terminus of one of polypeptide chains. The cytokine can be fused via a domain linker, and while not shown in certain domain arrangements herein, any domain arrangement can be specified as comprising a domain linker separating two domains. For example, in these structures, the cytokine can be placed at the C-terminus of the first (central) polypeptide chain or at the C-terminus of the third polypeptide chain (when such third chain is present).

[0288] Examples of the domain arrangements (N- to C-terminus, left to right) of central polypeptide chains for use in heterodimeric proteins in which the NKp46 ABD is interposed between the Fc domain and cytokine (Cyt) and wherein the cytokine moiety is placed on a different polypeptide chain (e.g. the second polypeptide chain) include any of the following, wherein each V is a variable domain:

Vₐ₋₁-(CH1 or Cκ)-Fc domain-Vₐ₋₂-V_{b-2} (first/central chain)

or

Vₐ₋₁-V_{b}-Fc domain-Vₐ₋₂-(CH1 or Cκ) (first/central chain)

[0289] Further examples of the domain arrangements of central polypeptide chains for use in heterodimeric proteins wherein the cytokine moiety is placed on the central chain include:

Vₐ₋₁-(CH1 or Cκ)-Fc domain-Vₐ₋₂-V_{b-2}-Cyt (first/central chain)

or

Vₐ₋₁-V_{b-1}-Fc domain-Vₐ₋₂-(CH1 or Cκ)-Cyt (first/central chain)

[0290] Examples of domain arrangements (N- to C-termini from left to right) of central polypeptide chains for use in heterotrimeric proteins in which the NKp46 ABD is interposed between the Fc domain and cytokine (Cyt), and wherein the cytokine moiety is placed on a different polypeptide chain (e.g. the second or third polypeptide chain) can include:

Vₐ₋₁-(CH1 or Cκ)ₐ-Fc domain-Vₐ₋₂-(CH1 or Cκ) (first/central chain)

[0291] Further examples of the domain arrangements of central polypeptide chains for use in heterotrimeric proteins wherein the cytokine moiety is placed on the central chain include:

Vₐ₋₁-(CH1 or Cκ)ₐ-Fc domain-Vₐ₋₂-(CH1 or Cκ)-Cyt (first/central chain)

[0292] In the above examples, when V domains are arranged immediately adjacent to one another in tandem on a chain, one of the V is a light chain and the other V is heavy chain variable domain, and the two V domains are separated by a flexible polypeptide linker and together form a scFv.

[0293] Further examples of central polypeptide chains include:

Vₐ₋₁-(CH1 or Cκ)ₐ-Fc domain-V₂-Cyt

or

V₂-Fc domain-Vₐ₋₁-(CH1 or Cκ)-Cyt
[0294] wherein V₂ is a single domain ABD (e.g. dAb, VHH, DARPin).

[0295] The Fc domain of the central chain may be a full Fc domain or a portion thereof sufficient to confer the desired functionality (e.g. binding to FcRn, binding to CD16, CH3-CH3 dimerization) when it forms a dimeric Fc with the Fc domain of a second polypeptide chain.

[0296] A second polypeptide chain can then be configured which will comprise an immunoglobulin variable domain and a CH1 or Cκ constant region, e.g., a (CH1 or Cκ)_{b} unit, selected so as to permit CH1-Cκ heterodimerization with the central polypeptide chain; the immunoglobulin variable domain will be selected so as to complement the variable domain of the central chain that is adjacent to the CH1 or Cκ domain, whereby the complementary variable domains form an antigen binding domain for a first antigen of interest.

[0297] For example, a second polypeptide chain for use in a protein in which the NKp46 ABD is interposed between Fc and cytokine can comprise a domain arrangement:

V_{b-1}-(CH1 or Cκ)_{b}-Fc domain
[0298] such that the (CH1 or Cκ)_{b} dimerizes with the (CH1 or Cκ)ₐ on the central chain, and the V_{b-1} forms an antigen binding domain together with Vₐ₋₁ of the central chain. If the Vₐ₋₁ of the central chain is a light chain variable domain, then V_{b-1} will be a heavy chain variable domain; and if Vₐ₋₁ of the central chain is a heavy chain variable domain, then V_{b-1} will be a light chain variable domain.

[0299] In heterodimers, the antigen binding domain for the second antigen of interest can then be formed from Vₐ₋₂ and V_{b-2} which are configured as tandem variable domains on the central chain forming an ABD (e.g. forming an scFv unit).

[0300] The resulting heterodimer can, for example, have the following configuration (see further examples of such proteins shown as formats T13 and T13A shown in FIGS. 2C, 2D and 2G and 2H:

[chemical structure]

wherein one of Vₐ₋₁ of the first polypeptide chain and V_{b-1} of the second polypeptide chain is a light chain variable domain and the other is a heavy chain variable domain, and wherein one of Vₐ₋₂ and V_{b-2} is a light chain variable domain and the other is a heavy chain variable domain. Vₐ₋₂ and V_{b-2} can be specified as being separated by a polypeptide linker (Vₐ₋₂ and V_{b-2} form an scFv). Vₐ₋₂ and V_{b-2} forms the ABD that binds NKp46 and Vₐ₋₁ and V_{b-1} forms the ABD that binds the antigen of interest (e.g. cancer antigen).

[0301] Examples of domain arrangements of heteromultimeric proteins include the following, optionally wherein one or both of the hinge domains are replaced by a flexible linker polypeptide, wherein the NKp46 ABD is an scFv or a single domain ABD (e.g. dAb, VHH, DARPin) and the Fc domain is fused to the NKp46 ABD a linker polypeptide, and wherein the NKp46 ABD is fused to the cytokine polypeptide by a domain linker (e.g. a flexible polypeptide linker):

[chemical structure]

[0302] Heterotrimeric proteins in which the NKp46 ABD is interposed between the Fc domain and the cytokine polypeptide can for example be formed by using a central (first) polypeptide chain comprising a first variable domain (V) fused to a first CH1 or Cκ constant region, a second variable domain (V) fused to a second CH1 or Cκ constant region, and an Fc domain or portion thereof interposed between the first and second variable domains (i.e. the Fc domain is interposed between the first and second (V-(CH1/Cκ) units. For example, a central polypeptide chain for use in a heterotrimeric protein according to the invention can have the domain arrangements (N- to C-termini) as follows:

Vₐ₋₁-(CH1 or Cκ)ₐ-Fc domain-Vₐ₋₂-(CH1 or Cκ)_{b}.

[0303] The first polypeptide chain can optionally further have a Cyt is placed at its C-terminus.

[0304] A second polypeptide chain can then comprise a domain arrangement (N- to C-termini from left to right):

V_{b-1}-(CH1 or Cκ)_{c}-Fc domain
[0305] such that the (CH1 or Cκ)_{c} dimerizes with the (CH1 or Cκ)ₐ on the central chain, and the Vₐ₋₁ and V_{b-1} form an antigen binding domain that binds the antigen of interest.

[0306] A third polypeptide chain can then comprise the following domain arrangement (N- to C-termini from left to right):

V_{b-2}-(CH1 or Cκ)_{d}-Cyt.
[0307] such that the (CH1 or Cκ)_{d} dimerizes with the (CH1 or Cκ)_{b} unit on the central chain, and the Vₐ₋₂ and V_{b-2} form the NKp46 binding domain.

[0308] Optionally, where the Cyt is placed at the C-terminus of the first polypeptide chain, the third polypeptide chain can then comprise the following domain arrangement (N- to C-termini from left to right):

V_{b-2}-(CH1 or Cκ)_{d}

[0309] An example of a domain configuration of a resulting heterotrimer where the Cyt is placed on the third polypeptide chain (also shown as formats T5, T6 in FIG. 2) is shown below:

[chemical structure]

[0310] A domain configuration of a resulting heterotrimer where the Cyt is placed on the first polypeptide chain is shown below:

[chemical structure]

[0311] Thus, in a trimeric polypeptide in which the NKp46 ABD is interposed between the Fc domain and the cytokine polypeptide, the first polypeptide can have two variable domains that each form an antigen binding domain with a variable domain on a separate polypeptide chain (i.e. the variable domain of the second and third chains), the second polypeptide chain has one variable domain, and the third polypeptide has one variable domain, and one of the polypeptide chains comprises a cytokine polypeptide fused to its C-terminus.

[0312] A trimeric polypeptide can optionally comprise three polypeptide chains characterized as follows:
[0313] (a) a first polypeptide chain comprising from N-terminus to C-terminus: a first variable domain (V) fused to a first CH1 or Cκ constant region, a hinge domain or portion thereof, an Fc domain or portion thereof, and a second variable domain (V) fused to a second CH1 or Cκ constant region;
[0314] (b) a second polypeptide chain comprising from N-terminus to C-terminus: a variable domain fused to a CH1 or Cκ constant region selected to be complementary to the first CH1 or Cκ constant region of the first polypeptide chain such that the first and second polypeptides form a CH1-Cκ heterodimer, a hinge domain or portion thereof, and an Fc domain; and
[0315] (c) a third polypeptide chain comprising from N-terminus to C-terminus: a variable domain fused to a CH1 or Cκ constant region, and a cytokine polypeptide (e.g. fused to the constant region via a flexible polypeptide linker), wherein the variable domain and the constant region are selected to be complementary to the second variable domain and second CH1 or Cκ constant region of the first polypeptide chain such that the first and third polypeptides form a CH1-Cκ heterodimer bound by non-covalent interactions and optionally further disulfide bond(s) formed between the CH1 or Cκ constant region of the third polypeptide and the second CH1 or Cκ constant region of the first polypeptide, but not between the CH1 or Cκ constant region of the third polypeptide and the first CH1 or Cκ constant region of the first polypeptide
[0316] wherein the first, second and third polypeptides form a heterotrimer, and wherein the first variable domain of the first polypeptide chain and the variable domain of the second polypeptide chain form an antigen binding domain specific for an antigen of interest (e.g. on a target cell, a cancer antigen), and the second variable domain of the first polypeptide chain and the variable domain on the third polypeptide chain form an antigen binding domain that binds NKp46.

[0317] Examples of potential domain arrangements for such trimeric bispecific polypeptides include but are not limited to those shown in Table 2 below:

TABLE 2

[chemical structure]

[chemical structure]

[chemical structure]

[0318] In another aspect, a trimeric polypeptide can optionally be characterized as comprising three polypeptide chains:
[0319] (a) a first polypeptide chain comprising from N-terminus to C-terminus: a first variable domain (V) fused to a first CH1 or Cκ constant region, a hinge domain or portion thereof, an Fc domain or portion thereof, and a second variable domain (V) fused to a second CH1 or Cκ constant region, and a cytokine polypeptide (e.g. fused to the second CH1 or Cκ constant region via a flexible polypeptide linker);
[0320] (b) a second polypeptide chain comprising from N-terminus to C-terminus: a variable domain fused to a CH1 or Cκ constant region selected to be complementary to the first CH1 or Cκ constant region of the first polypeptide chain such that the first and second polypeptides form a CH1-Cκ heterodimer, a hinge domain or portion thereof, and an Fc domain; and
[0321] (c) a third polypeptide chain comprising from N-terminus to C-terminus: a variable domain fused to a CH1 or Cκ constant region, wherein the variable domain and the constant region are selected to be complementary to the second variable domain and second CH1 or Cκ constant region of the first polypeptide chain such that the first and third polypeptides form a CH1-Cκ heterodimer bound by non-covalent interactions and optionally further disulfide bond(s) formed between the CH1 or Cκ constant region of the third polypeptide and the second CH1 or Cκ constant region of the first polypeptide, but not between the CH1 or Cκ constant region of the third polypeptide and the first CH1 or Cκ constant region of the first polypeptide
[0322] wherein the first, second and third polypeptides form a CH1-Cκ heterotrimer, and wherein the first variable domain of the first polypeptide chain and the variable domain of the second polypeptide chain form an antigen binding domain specific for an antigen of interest (e.g. on a target cell, a cancer antigen), and the second variable domain of the first polypeptide chain and the variable domain on the third polypeptide chain form an antigen binding domain that binds NKp46.

[0323] Examples of potential domain arrangements for such trimeric bispecific polypeptides include but are not limited to those shown in Table 3 below:

TABLE 3

[chemical structure]

[chemical structure]

[chemical structure]

[0324] Using similar architecture, yet further multispecific proteins can be produced that binds the antigen of interest bivalently, binds NKp46 monovalently and binds the cytokine receptor monovalently, i.e., the multispecific protein has a 2:1:1 configuration. Examples are shown in FIG. 2.

[0325] In one example of a multispecific protein having two ABDs that each binds an antigen of interest, a heterodimer protein comprises the domain arrangement:

[chemical structure]

In these structures, the Fc domains of the first and second chains associate via CH3-CH3 dimerization, and (CH1 or Cκ)_{b} on the second chain and the (CH1 or Cκ)ₐ on the first chain undergo CH1-Cκ dimerization, wherein ABD₁ that binds NKp46 and ABD₂ and ABD₃ are each self-contained antigen binding domains that can bind an antigen of interest (e.g. a cancer antigen) without association with a complementary domain on a different polypeptide chain, wherein each (CH1 or Cκ)_{b} and (CH1 or Cκ)ₐ is fused to the Fc domain via an immunoglobulin hinge amino acid sequence, and wherein Cyt is a cytokine polypeptide (e.g. fused to the ABD₁ via a flexible polypeptide linker). Another representation of the heterodimeric protein is:

[chemical structure]

where each V domain pair Vₐ₁-V_{b1}, Vₐ₂-V_{b2} and Vₐ₃-V_{b3} comprises a VH and VL fused via a domain linker such the pair forms an scFv antigen binding domain.

[0326] In an example of a multispecific protein having two ABDs that each binds an antigen of interest, a heterotrimer protein comprises the domain arrangement:

[chemical structure]

[0327] In these structures, the Fc domains of the first and third chains associate via CH3-CH3 dimerization, (CH1 or Cκ)_{c} on the third chain and the (CH1 or Cκ)ₐ on the central chain undergo CH1-Cκ dimerization, and the (CH1 or Cκ)_{b} on the first chain and the (CH1 or Cκ)_{d} on the second chain undergo CH1-Cκ dimerization. The Vₐ₁ and V_{b1} form a first antigen binding domain that bind NKp46. ABD₂ and ABD₃ are each self-contained antigen binding domains that can bind to an antigen of interest (e.g. a cancer antigen), e.g. without requiring association with a complementary variable domain on a different polypeptide chain. ABD₂ and ABD₃ can for example each comprise a single domain ABD or a VH and a Vκ pair (in any desired order), placed on a single chain and separated by a flexible peptide linker (e.g. as an scFv), such that a heterotrimer protein can comprise:

[chemical structure]

[0328] Examples of possible configurations of a resulting heterotrimer are structures having domain arrangement, from N- to C-terminus:

[chemical structure]

[0329] In another example of a multispecific protein having two ABDs that each binds an antigen of interest, a heterotetramer protein can be constructed in which the NKp46 ABD is interposed between the Fc domain and the cytokine, for example molecules having the following domain arrangement, wherein a domain:

[chemical structure]

wherein the first chain and the second chain associate by CH3-CH3 dimerization and the first chain and the third chain associate by the CH1 or Cκ dimerization, wherein the domains of the first chain and the third chain are selected to be complementary to permit the first and third chains to associate by CH1-Cκ dimerization, wherein the domains of the second chain and the fourth chain are selected to be complementary to permit the second and fourth chains to associate by CH1-Cκ dimerization, and wherein each V domain pair Vₐ₁ and V_{b1}, Vₐ₂ and V_{b2} and Vₐ₃ and V_{b3} comprises a VH and a VL such the pair forms ABD, wherein Vₐ₋₁ and V_{b-1} are separated by a domain linker to form an scFv that binds NKp46, and wherein the Vₐ₁ and V_{b1} pair and the Vₐ₂ and V_{b2} pair each forms and ABD that binds an antigen of interest.

[0330] Examples of such configurations include shown in the Table 4 below:

TABLE 4

[chemical structure]

[chemical structure]

[chemical structure]

[0331] The domain arrangements can also be respectively represented as follows, in which each L is a domain linker:

[chemical structure]

[0332] When the NKp46 ABD and the cytokine receptor ABD are positioned in “cis” with respect to the N- and C-termini of Fc domain (e.g., both are placed on the C-terminal side of the dimeric Fc) they will preferably be positioned so as to enhance the ability to bind NKp46, CD16A and cytokine receptor in a membrane planar binding conformation. In one embodiment, a cis configuration is obtained by positioning the NKp46 ABD (e.g. as a scFv) on a polypeptide chain comprising an Fc domain, where the NKp46 ABD is positioned at the C-terminus of the Fc domain (cis), and positioning the cytokine receptor ABD (e.g. cytokine) topologically C-terminal to the NKp46 ABD. In one embodiment, a cis configuration (with respect to the termini of the Fc domain) is obtained by positioning a portion of a NKp46 binding Fab on a first polypeptide chain comprising an Fc domain, and positioning the cytokine receptor ABD (e.g. cytokine) on the first chain or on a second polypeptide chain that associates with the first chain and comprises a complementary portion of the NKp46 binding Fab, optionally wherein the second polypeptide chain lacks an Fc domain. In an exemplary cis configuration, a first portion of a NKp46 ABD can be positioned on a first polypeptide chain comprising an Fc domain, and the cytokine receptor ABD (e.g. cytokine) is positioned on a different second polypeptide chain that lacks an Fc domain but that has a complementary second portion of the NKp46 ABD, where the second polypeptide chain and second portion associates with the first polypeptide chain and first portion to form a NKp46 ABD (e.g. an NKp46 binding Fab). A portion of an ABD or Fab can for example be a VH or VL domain thereof, a VH-CH1, Vκ-CH1, VL-CL or VL-CL domain. It can optionally be specified that the cytokine receptor ABD is positioned adjacent and C-terminal of the complementary VH-CH1, Vκ-CH1, VL-CL or VL-CL component of the NKp46 ABD on the first or second chain, or adjacent and C-terminal of the Fc domain on the first chain.

[0333] In any embodiment, it may be specified that the protein has a Fc domain dimer comprised of a first and second Fc domain monomer placed on separate chains that dimerize via CH3-CH3 association, wherein one of the Fc domain monomers is connected to the both the anti-NKp46 ABD and the cytokine, and the other (second) Fc domain monomer has a free C-terminus (no anti-NKp46 ABD or cytokine fused to its C-terminus).

[0334] Optionally in any embodiment herein, fusions or linkages on the same polypeptide chain between different domains (e.g., between two V domains placed in tandem, between V domains and CH1 or Cκ domains, between CH1 or Cκ domains and Fc domains, between Fc domains monomers and V domains, between Fc domain monomers and cytokine) may occur via intervening amino acid sequences, for example via a hinge region or linker peptide. Generally, domain arrangements or structures herein are depicted without showing domain linkers, and it will be appreciated that the domain arrangements can be specified as having domain linkers between a specified domain. For example, the cytokine can be specified as being fused to an adjacent domain via a domain linker, and a domain linker can be inserted in the relevant domain arrangement or structure. In another example, tandem variable domains (e.g. in an scFv) can be specified as being fused to one another via a domain linker, and a domain linker can be inserted between the two V regions in the relevant domain arrangement or structure. In another example, a CH1 or CL (or Cκ) constant region can be fused to an Fc domain or CH2 domain thereof via a domain linker or hinge domain or portion thereof, and accordingly a domain linker or hinge domain or portion thereof can be inserted between CH1 or CL domain and the Fc domain or CH2 domain in the relevant domain arrangement or structure. An example of the domain arrangement of a multispecific protein with linkers shown is shown in FIG. 2A for the representative heterotrimer in format “T5”, shows domain linkers such as hinge and glycine-serine linkers, and interchain disulfide bridges.

[0335] In any embodiment herein, a polypeptide chain (e.g., chain 1, 2, 3 or 4) can be specified as having a free N and/or C terminus (no other protein domains at the terminus of the polypeptide chain).

[0336] In any embodiment herein, the proteins domains described herein can optionally be specified as being indicated from N- to C-termini. Protein arrangements of the disclosure for purposes of illustration are shown from N-terminus (on the left) to C-terminus (on the right). Adjacent domains on a polypeptide chain can be referred to as being fused to one another (e.g. a domain can be said to be fused to the C-terminus of the domain on its left, and/or a domain can be said to be fused to the N-terminus of the domain on its right). The proteins domains described herein can be fused to one another directly (e.g. V domains fused directly to CH1 or CL domains) or via linkers or short intervening amino acid sequences that serve to connect the domains on a polypeptide chain (e.g. they may optionally be specified to lack other predetermined functionality, or to lack specific binding to a predetermined ligand). Two polypeptide chains will be bound to one another (indicated by “i”), by non-covalent interactions, and optionally can further be attached via interchain disulfide bonds, formed between cysteine residues within complementary CH1 and Cκ domains.

### Connections and Linkers

[0337] Generally, there are a number of suitable linkers that can be used in the multispecific proteins, including traditional peptide bonds, generated by recombinant techniques. In some embodiments, the linker is a “domain linker”, used to link any two domains as outlined herein together. Adjacent protein domains can be specified as being connected or fused to one another by a domain linker. An exemplary domain linker is a (poly)peptide linker, optionally a flexible (poly)peptide linker. Peptide linkers or polypeptide linkers, used interchangeably herein, may have a subsequence derived from a particular domain such as a hinge, CH1 or CL domain, or may predominantly include the following amino acid residues: Gly, Ser, Ala, or Thr. The linker peptide should have a length that is adequate to link two molecules in such a way that they assume the correct conformation relative to one another so that they retain the desired activity. In one embodiment, the linker is from about 1 to 50 amino acids in length, preferably about 2 to 30 amino acids in length. In one embodiment, linkers of 4 to 20 amino acids in length may be used, with from about 5 to about 15 amino acids finding use in some embodiments. While any suitable linker can be used, many embodiments, linkers (e.g. flexible linkers) can utilize a glycine-serine polypeptide or polymer, including for example comprising (GS)ₙ, (GSGGS)ₙ, (GGGGS)ₙ, (GSSS)ₙ, (GSSSS)ₙ and (GGGS)ₙ, where n is an integer of at least one (optionally n is 1, 2, 3 or 4), glycine-alanine polypeptide, alanine-serine polypeptide, and other flexible linkers. Linkers comprising glycine and serine residues generally provides protease resistance. One example of a (GS)₁ linker is a linker having the amino acid sequence STGS; such a linker can be useful to fuse a domain to the C-terminus of an Fc domain (or a CH3 domain thereof). In some embodiments peptide linkers comprising (G₂S)ₙ are used, wherein, for example, n=1-20, e.g., (G₂S), (G₂S)₂, (G₂S)₃, (G₂S)₄, (G₂S)₅, (G₂S)₆, (G₂S)₇ or (G₂S)₈, or (G₃S)ₙ, wherein, for example, n is an integer from 1-15. In one embodiment, a domain linker comprises a (G₄S)ₙ peptide, wherein, for example, n is an integer from 1-10, optionally 1-6, optionally 1-4. In some embodiments peptide linkers comprising (GS₂)ₙ (GS₃)ₙ or (GS₄)ₙ are used, wherein, for example, n=1-20, e.g., (GS₂), (GS₂)₂, (GS₂)₃, (GS₃)₁, (GS₃)₂, (GS₃)₃, (GS₄)₁, (GS₄)₂, (GS₄)₃, wherein, for example, n is an integer from 1-15. In one embodiment, a domain linker comprises a (GS₄)ₙ peptide, wherein, for example, n is an integer from 1-10, optionally 1-6, optionally 1-4. In one embodiment, a domain linker comprises a C-terminal GS dipeptide, e.g., the linker comprises (GS₄) and has the amino acid sequence a GSSSS, GSSSSGSSSS, GSSSSGSSSSGS or GSSSSGSSSSGSSSS.

[0338] Any of the peptide or domain linkers may be specified to comprise a length of at least 2 residues, 3 residues, 4 residues, at least 5 residues, at least 10 residues, at least 15 residues, at least 20 residues, or more. In other embodiments, the linkers comprise a length of between 2-4 residues, between 2-4 residues, between 2-6 residues, between 2-8 residues, between 2-10 residues, between 2-12 residues, between 2-14 residues, between 3-15 residues, between 4-15 residues, between 2-16 residues, between 2-18 residues, between 2-20 residues, between 2-22 residues, between 2-24 residues, between 2-26 residues, between 2-28 residues, between 2-30 residues, between 2 and 50 residues, or between 10 and 50 residues.

[0339] Examples of polypeptide linkers may include sequence fragments from CH1 or CL domains; for example the first 4-12 or 5-12 amino acid residues of the CL/CH1 domains are particularly useful for use in linkages of scFv moieties. Linkers can be derived from immunoglobulin light chains, for example CK or Cλ. Linkers can be derived from immunoglobulin heavy chains of any isotype, including for example Cy1, Cy2, Cy3, Cy4 and Cμ. Linker sequences may also be derived from other proteins such as Ig-like proteins (e.g. TCR, FcR, KIR), hinge region-derived sequences, and other natural sequences from other proteins. In certain domain arrangements, V_{H} and V_{L} domains are linked to another in tandem separated by a linker peptide (e.g. a scFv) and in turn be fused to the N- or C-terminus of an Fc domain (or CH2 domain thereof). Such tandem variable regions or scFv can be connected to the Fc domain via a hinge region or a portion thereof, an N-terminal fragment of a CH1 or CL domain, or a glycine- and serine-containing flexible polypeptide linker.

[0340] Fc domains can be connected to other domains via immunoglobulin-derived sequence or via non-immunoglobulin sequences, including any suitable linking amino acid sequence. Advantageously, immunoglobulin-derived sequences can be readily used between CH1 or CL domains and Fc domains, in particular, where a CH1 or CL domain is fused at its C-terminus to the N-terminus of an Fc domain (or CH2 domain). An immunoglobulin hinge region or portion of a hinge region can and generally will be present on a polypeptide chain between a CH1 domain and a CH2 domain. A hinge or portion thereof can also be placed on a polypeptide chain between a CL (e.g. Cκ) domain and the CH2 domain of an Fc domain when a CL is adjacent to an Fc domain on the polypeptide chain. However, it will be appreciated that a hinge region can optionally be replaced for example by a suitable linker peptide, e.g. a flexible polypeptide linker.

[0341] The NKp46 ABD and cytokine receptor ABD (e.g., a cytokine) are advantageously linked to the rest of the multispecific protein (e.g. or to a constant domain or Fc domain thereof) via a flexible linker (e.g. polypeptide linker) that leads to less structural rigidity or stiffness (e.g. between or amongst the ABD and Fc domain) compared to a conventional (e.g. wild-type full length human IgG) antibody. For example, the multispecific protein may have a structure or a flexible linker between the NKp46 ABD and constant domain or Fc domain that permits an increased range of domain motion compared to the two ABDs in a conventional (e.g. wild-type full length human IgG) antibody. In particular, the structure or a flexible linker can be configured to confer on the antigen binding sites greater intrachain domain movement compared to antigen binding sites in a conventional human IgG1 antibody. Rigidity or domain motion/interchain domain movement can be determined, e.g., by computer modeling, electron microscopy, spectroscopy such as Nuclear Magnetic Resonance (NMR), X-ray crystallography, or Sedimentation Velocity Analytical ultracentrifugation (AUC) to measure or compare the radius of gyration of proteins comprising the linker or hinge. A test protein or linker may have lower rigidity relative to a comparator protein if the test protein has a value obtained from one of the tests described in the previous sentence differs from the value of the comparator, e.g., an IgG1 antibody or a hinge, by at least 5%, 10%, 25%, 50%, 75%, or 100%. A cytokine can for example be fused to the C-terminus of a CH3 domain by a linker selected from GSSSS (SEQ ID NO: 171), GSSSSGSSSS (SEQ ID NO: 172), GSSSSGSSSSGS (SEQ ID NO: 173) or GSSSSGSSSSGSSSS (SEQ ID NO: 174).

[0342] In one embodiment, the multispecific protein may have a structure or a flexible linker between the NKp46 ABD and Fc domain that permits the NKp46 ABD and the ABD which binds an antigen of interest to have a spacing between said ABDs comprising less than about 80 angstroms, less than about 60 angstroms or ranges from about 40-60 angstroms.

[0343] At its C-terminus, an Fc domain (or a CH3 domain thereof) can be connected to the N-terminus of an NKp46 ABD or a cytokine polypeptide via a polypeptide linker, for example a glycine-serine-containing linker, optionally a linker having the amino acid sequence STGS.

[0344] In certain embodiments, a CH1 or CL domain of a Fab (e.g. of an NKp46 ABD) is fused at its C-terminus to the N-terminus of the cytokine via a flexible polypeptide linker, for example a glycine-serine-containing linker. Preferably, the linker will have a chain length of at least 4 amino acid residues, optionally the linker has a length of 5, 6, 7, 8, 9 or 10 amino acid residues.

[0345] In certain embodiments, the NKp46 ABD is placed C-terminal to the Fc domain, and the NKp46 is positioned between an Fc domain and the cytokine polypeptide in the multispecific protein. The NKp46 ABD will be connected or fused at its N-terminus (at the N-terminus of a VH or a VL domain) to the C-terminus of the Fc domain via a linker (e.g. a glycine and serine containing linker, a linker having the sequence STGS, a flexible polypeptide linker) of sufficient length to enable the NKp46 binding ABD to fold and/or adopt an orientation in such a way as to permit binding to Nkp46 at the surface of an NK cell, while at the same time possesses a sufficient distance and range of motion relative to the adjacent Fc domain (or more generally to rest of the multispecific protein) such that the Fc domain can also simultaneously be found by CD16 expressed at the surface of the same NK cell. Additionally, when the NKp46 ABD is placed between an Fc domain and an cytokine polypeptide in the multispecific protein, the C-terminus of a VH or VL of an scFv NKp46 ABD, or the CH1 or CL domain of a Fab NKp46 ABD will be connected or fused to the N-terminus of the cytokine polypeptide via a flexible linker (e.g. a flexible polypeptide linker) of sufficient length to enable the NKp46 binding ABD to fold and/or adopt an orientation in such a way as to permit binding to Nkp46 at the surface of an NK cell, while at the same time providing a sufficient distance and range of motion relative to the adjacent cytokine polypeptide such that the cytokine polypeptide can also simultaneously be bound by its cytokine receptor expressed at the surface of the NK cell. Preferably, the linker will have a chain length of at least 4 amino acid residues, optionally the linker has a length of 5, 6, 7, 8, 9 or 10 amino acid residues.

[0346] In tandem variable regions (e.g. scFv), two V domains (e.g. a V_{H} domain and V_{L} domains are generally linked together by a linker of sufficient length to enable the ABD to fold in such a way as to permit binding to the antigen for which the ABD is intended to bind. Examples of linkers include linkers comprising glycine and serine residues, e.g., the amino acid sequence GEGTSTGSGGSGGSGGAD (SEQ ID NO: 509). In another specific embodiment, the V_{H} domain and V_{L} domains of a scFv are linked together by the amino acid sequence (G₄S)₃.

[0347] In one embodiment, a (poly)peptide linker used to link a VH or VL domain of an scFv to a CH2 domain of an Fc domain comprises a fragment of a CH1 domain or CL domain and/or hinge region. For example, an N-terminal amino acid sequence of CH1 can be fused to a variable domain in order to mimic as closely as possible the natural structure of a wild-type antibody. In one embodiment, the linker comprises an amino acid sequence from a hinge domain or an N-terminal CH1 amino acid. In one embodiment, the linker peptide mimics the regular VK-CK elbow junction, e.g., the linker comprises or consists of the amino acid sequence RTVA.

[0348] In one embodiment, the hinge region used to connect the C-terminal end of a CH1 or CK domain (e.g. of a Fab) with the N-terminal end of a CH2 domain will be a fragment of a hinge region (e.g. a truncated hinge region without cysteine residues) or may comprise one or more amino acid modifications which remove (e.g. substitute by another amino acid, or delete) a cysteine residue, optionally both cysteine residues in a hinge region. Removing cysteines can be useful to prevent undesired disulfide bond formation, e.g., the formation of disulfide bridges in a monomeric polypeptide.

[0349] A “hinge” or “hinge region” or “antibody hinge region” herein refers to the flexible polypeptide or linker between the first and second constant domains of an antibody. Structurally, the IgG CH1 domain ends at EU position 220, and the IgG CH2 domain begins at residue EU position 237. Thus for an IgG the hinge generally includes positions 221 (D221 in IgG1) to 236 (G236 in IgG1), wherein the numbering is according to the EU index as in Kabat. References to specific amino acid residues within constant region domains found within the polypeptides shall be, unless otherwise indicated or as otherwise dictated by context, be defined according to Kabat, in the context of an IgG antibody.

[0350] In one embodiment, the hinge region (or fragment thereof) is derived form a hinge domain of a human IgG1 antibody. For example a hinge domain may comprise the amino acid sequence: THTCPPCPAPELL (SEQ ID NO: 166) or a fragment comprising the first 8 resides thereof, or an amino acid sequence at least 60%, 70%, 80% or 90% identical to any of the foregoing, optionally wherein one or both cysteines are deleted or substituted by a different amino acid residue, optionally a serine.

[0351] In one embodiment, the hinge region (or fragment thereof) is derived from a Cμ2-C Cμ3 hinge domain of a human IgM antibody. For example a hinge domain may comprise the amino acid sequence: NASSMCVPSPAPELL (SEQ ID NO: 167), or an amino acid sequence at least 60%, 70%, 80% or 90% identical thereto, optionally wherein one or both cysteines are deleted or substituted by a different amino acid residue.

[0352] Polypeptide chains that dimerize and associate with one another via non-covalent bonds or interactions may or may not additionally be bound by an interchain disulfide bond formed between respective CH1 and Cκ domains, and/or between respective hinge domains on the chains. CH1, Cκ and/or hinge domains (or other suitable linking amino acid sequences) can optionally be configured such that interchain disulfide bonds are formed between chains such that the desired pairing of chains is favored and undesired or incorrect disulfide bond formation is avoided. For example, when two polypeptide chains to be paired each possess a CH1 or Cκ adjacent to a hinge domain, the polypeptide chains can be configured such that the number of available cysteines for interchain disulfide bond formation between respective CH1/Cκ-hinge segments is reduced (or is entirely eliminated). For example, the amino acid sequences of respective CH1, Cκ and/or hinge domains can be modified to remove cysteine residues in both the CH1/Cκ and the hinge domain of a polypeptide; thereby the CH1 and Cκ domains of the two chains that dimerize will associate via non-covalent interaction(s).

[0353] In another example, the CH1 or Cκ domain adjacent to (e.g., N-terminal to) a hinge domain comprises a cysteine capable of interchain disulfide bond formation, and the hinge domain which is placed at the C-terminus of the CH1 or Cκ comprises a deletion or substitution of one or both cysteines of the hinge (e.g. Cys 239 and Cys 242, as numbered for human IgG1 hinge according to Kabat). In one embodiment, the hinge region (or fragment thereof) comprise the amino acid sequence: THTSPPSPAPELL (SEQ ID NO: 168), or an amino acid sequence at least 60%, 70%, 80% or 90% identical thereto.

[0354] In another example, the CH1 or Cκ domain adjacent (e.g., N-terminal to) a hinge domain comprises a deletion or substitution at a cysteine residue capable of interchain disulfide bond formation, and the hinge domain placed at the C-terminus of the CH1 or Cκ comprises one or both cysteines of the hinge (e.g. Cys 239 and Cys 242, as numbered for human IgG1 hinge according to Kabat). In one embodiment, the hinge region (or fragment thereof) comprises the amino acid sequence: THTCSSCPAPELL (SEQ ID NO: 169), or an amino acid sequence at least 60%, 70%, 80% or 90% identical thereto.

[0355] In another example, a hinge region is derived from an IgM antibody. In such embodiments, the CH1/CK pairing mimics the Cμ2 domain homodimerization in IgM antibodies. For example, the CH1 or Cκ domain adjacent (e.g., N-terminal to) a hinge domain comprises a deletion or substitution at a cysteine capable of interchain disulfide bond formation, and an IgM hinge domain which is placed at the C-terminus of the CH1 or Cκ comprises one or both cysteines of the hinge. In one embodiment, the hinge region (or fragment thereof) comprises the amino acid sequence: THTCSSCPAPELL (SEQ ID NO: 170), or an amino acid sequence at least 60%, 70%, 80% or 90% identical thereto.

[0356] Alternatively to the polypeptide linkers, a variety of nonproteinaceous polymer or chemical linkers may find use in the multispecific proteins. For example nonproteinaceous polymers including but not limited to polyethylene glycol (PEG), polypropylene glycol, polyoxyalkylenes, or copolymers of polyethylene glycol and polypropylene glycol, may find use as linkers. In some examples, an amino acid sequence in a polypeptide chain of a multispecific protein may be modified to introduce a reactive group, optionally a protected reactive group, and the so-modified protein or chain is then reacted with a linker or a polypeptide comprising a complementary reactive group. In some examples, an amino acid residue in a polypeptide chain of a multispecific protein can be bound to a linker comprising a reactive group (for further reaction with a second polypeptide functionalized with a linker with a complementary reactive group) or directly a second polypeptide via an enzyme catalyzed reaction. For example, a polypeptide comprising an acceptor glutamine or lysine can reacted with linker comprising a primary amine in the presence of a transglutamine enzyme (e.g. Bacterial Transglutaminase, BTG) such that the transglutaminase enzyme catalyzes the conjugation of the linker to an acceptor glutamine residue within the primary structure of the polypeptide, for example within an immunoglobulin constant domain or within a TGase recognition tag inserted or appended to (e.g., fused to) a constant region. A second polypeptide can also be functionalized with a linker in a similar manner, and when the conjugated linkers each bear complementary reactive groups (e.g. R on the linker of one polypeptide and R′ on the linker of the other polypeptide), the two functionalized polypeptides can be reacted such that they are bound via the linker comprising the residue of the reaction or R with R′. Examples of reactive group pairs R and R′ include a range of groups capable of biorthogonal reaction, for example 1,3-dipolar cycloaddition between azides and cyclooctynes (copper-free click chemistry), between nitrones and cyclooctynes, oxime/hydrazone formation from aldehydes and ketones and the tetrazine ligation (see also WO2013/092983). The resulting linker and functionalized antibody, or the Y element thereof, can thus comprise a RR′ group resulting from the reaction of R and R′, for example a triazole. Methods and linkers for use in BTG-mediated conjugation to antibodies is described in PCT publication no. WO2014/202773, the disclosure of which is incorporated by reference. “Transglutaminase”, used interchangeably with “TGase” or “TG”, refers to an enzyme capable of cross-linking proteins through an acyl-transfer reaction between the γ-carboxamide group of peptide-bound glutamine and the ε-amino group of a lysine or a structurally related primary amine such as amino pentyl group, e.g. a peptide-bound lysine, resulting in a ε-(γ-glutamyl)lysine isopeptide bond. TGases include, inter alia, bacterial transglutaminase (BTG) such as the enzyme having EC reference EC 2.3.2.13 (protein-glutamine-γ-glutamyltransferase). The term “acceptor glutamine” residue, when referring to a glutamine residue of an antibody, means a glutamine residue that is recognized by a TGase and can be cross-linked by a TGase through a reaction between the glutamine and a lysine or a structurally related primary amine such as amino pentyl group. Preferably the acceptor glutamine residue is a surface-exposed glutamine residue. The term “TGase recognition tag” refers to a sequence of amino acids comprising an acceptor glutamine residue and that when incorporated into (e.g. appended to) a polypeptide sequence, under suitable conditions, is recognized by a TGase and leads to cross-linking by the TGase through a reaction between an amino acid side chain within the sequence of amino acids and a reaction partner. The recognition tag may be a peptide sequence that is not naturally present in the polypeptide comprising the enzyme recognition tag. Examples of TGase recognition tags include the amino acid sequences disclosed in WO2012/059882 and WO2014/072482, the disclosure of which sequences are incorporated herein by reference.

[0357] Constant Regions

[0358] Constant region domains can be derived from any suitable human antibody, particularly human antibodies of gamma isotype, including, the constant heavy (CH1) and light (CL, Cκ or Cλ) domains, hinge domains, CH2 and CH3 domains.

[0359] With respect to heavy chain constant domains, “CH1” generally refers to positions 118-220 according to the EU index as in Kabat. Depending on the context, a CH1 domain (e.g. as shown in the domain arrangements), can optionally comprise residues that extend into the hinge region such that the CH1 comprises at least part of a hinge region. For example, when positioned C-terminal on a polypeptide chain and/or or C-terminal to the Fc domain, and/or within a Fab structure that is or C-terminal to the Fc domain, the CH1 domain can optionally comprise at least part of a hinge region, for example CH1 domains can comprise at least an upper hinge region, for example an upper hinge region of a human IgG1 hinge, optionally further in which the terminal threonine of the upper hinge can be replaced by a serine. Such a CH2 domain can therefore comprise at its C-terminus the amino acid sequence: EPKSCDKTHS (SEQ ID NO: 440).

[0360] Exemplary human CH1 domain amino acid sequences include:

(SEQ ID NO: 156)
ASTKGPSVFPLAPSSKSTSGGTAALGCLVKDYFPEPVTVSWNSGALTSGV
HTFPAVLQSSGLYSLSSVVTVPSSSLGTQTYICNVNHKPSNTKVDKRV
or
(SEQ ID NO: 157)
ASTKGPSVFPLAPSSKSTSGGTAALGCLVKDYFPEPVTVSWNSGALTSGV
HTFPAVLQSSGLYSLSSVVTVPSSSLGTQTYICNVNHKPSNTKVDKRVEP
KSCDKTHS.
or
(SEQ ID NO: 158)
ASTKGPSVFPLAPSSKSTSGGTAALGCLVKDYFPEPVTVSWNSGALTSGV
HTFPAVLQSSGLYSLSSVVTVPSSSLGTQTYICNVNHKPSNTKVDKRVEP
KSCDKTHT.

[0361] Exemplary human Cκ domain amino acid sequences include:

(SEQ ID NO: 159)
RTVAAPSVFIFPPSDEQLKSGTASVVCLLNNFYPREAKVQWKVDNALQSG
NSQESVTEQDSKDSTYSLSSTLTLSKADYEKHKVYACEVTHQGLSSPVTK
SFNRGEC.

[0362] In some exemplary configurations, the multispecific protein can be a heterodimer, a heterotrimer or a heterotetramer comprising one or two Fabs (e.g. one Fab binding NKp46 and the other binding the antigen of interest), in which variable regions, CH1 and/or CL domains are engineered by introducing amino acid substitutions in a knob-into-holes or electrostatic steering approach to promote the desired chain pairings of CH1 domains with CK domains. In some exemplary configurations, the multispecific protein can be a heterodimer, a heterotrimer or a heterotetramer comprising one or two Fabs (e.g. one Fab binding NKp46 and the other binding the antigen of interest), wherein a Fab has a VH/VL crossover (VH and VL replace one another) or a CH1/CL crossover (the CH1 and CL replace one another), and wherein the CH1 and/or CL domains comprise amino acid substitutions to promote correct chain association by knob-into-holes or electrostatic steering.

[0363] “CH2” generally refers to positions 237-340 according to the EU index as in Kabat, and “CH3” generally refers to positions 341-447 according to the EU index as in Kabat. CH2 and CH3 domains can be derived from any suitable antibody. Such CH2 and CH3 domains can be used as wild-type domains or may serve as the basis for a modified CH2 or CH3 domain. Optionally the CH2 and/or CH3 domain is of human origin or may comprise that of another species (e.g., rodent, rabbit, non-human primate) or may comprise a modified or chimeric CH2 and/or CH3 domain, e.g., one comprising portions or residues from different CH2 or CH3 domains, e.g., from different antibody isotypes or species antibodies.

[0364] In any of the domain arrangements, the Fc domain monomer may comprise a CH2-CH3 unit (a full length CH2 and CH3 domain or a fragment thereof). In heterodimers or heterotrimers comprising two chains with Fc domain monomers (i.e. the heterodimers or heterotrimers comprise a Fc domain dimer), the CH3 domain will be capable of CH3-CH3 dimerization (e.g. it will comprise a wild-type CH3 domain or a CH3 domain with modifications to promote a desired CH3-CH3 dimerization).

[0365] Exemplary human IgG1 CH2-CH3 (Fc) domain amino acid sequences include:

(SEQ ID NO: 160)
APELLGGPSVFLFPPKPKDTLMISRTPEVTCVVVDVSHEDPEVKFNWYVD
GVEVHNAKTKPREEQYNSTYRVVSVLTVLHQDWLNGKEYKCKVSNKALPA
PIEKTISKAKGQPREPQVYTLPPSREEMTKNQVSLTCLVKGFYPSDIAVE
WESNGQPENNYKTTPPVLDSDGSFFLYSKLTVDKSRWQQGNVFSCSVMHE
ALHNHYTQKSLSLSPG.

[0366] An Fc domain may optionally further comprise a C-terminal lysine (K). In some exemplary configurations, the multispecific protein can be a heterodimer, a heterotrimer or a heterotetramer, wherein the polypeptide chains are engineered for heterodimerization among each other so as to produce the desired protein. In embodiments where the desired chain pairings are not driven by CH1-Cκ dimerization or generally where enhancement of pairing is desired, the chains may comprise constant or Fc domains with amino acid modifications (e.g., substitutions) that favor the preferential chain pairing, e.g. favor a desired hetero-dimerization of the two different chains over the homo-dimerization of two identical chains.

[0367] In some embodiments, a “knob-into-holes” approach is used in which the domain interfaces (e.g. CH3 domain interface of the antibody Fc region) are mutated so that the antibodies preferentially heterodimerize. Mutations can be introduced to create altered charge polarity across the interface (e.g. Fc dimer interface) such that co-expression of electrostatically matched chains (e.g. Fc-containing chains) support favorable attractive interactions thereby promoting desired heterodimer (e.g. Fc heterodimer) formation, whereas unfavorable repulsive charge interactions suppress unwanted heterodimer (e.g., Fc homodimer) formation. See for example mutations and approaches reviewed in Brinkmann and Kontermann, 2017 MAbs, 9(2): 182-212, the disclosure of which is incorporated herein by reference. For example one heavy chain comprises a T366W substitution and the second heavy chain comprises a T366S, L368A and Y407V substitution, see, e.g. Ridgway et al (1996) Protein Eng., 9, pp. 617-621; Atwell (1997) J. Mol. Biol., 270, pp. 26-35; and WO2009/089004, the disclosures of which are incorporated herein by reference. For example the “Hole” mutations on a first Fc monomer can comprise Y349C/T366S/L368A/Y407V and the complementary “Knob” mutations on the second Fc monomer can comprise S354C/T366W (Kabat EU numbering). In another approach, one heavy chain comprises a F405L substitution and the second heavy chain comprises a K409R substitution, see, e.g., Labrijn et al. (2013) Proc. Natl. Acad. Sci. U.S.A., 110, pp. 5145-5150. In another approach, one heavy chain comprises T350V, L351Y, F405A, and Y407V substitutions and the second heavy chain comprises T350V, T366S, K392L, and T394W substitutions, see, e.g. Von Kreudenstein et al., (2013) mAbs 5:646-654. In another approach, one heavy chain comprises both K409D and K392D substitutions and the second heavy chain comprises both D399K and E356K substitutions, see, e.g. Gunasekaran et al., (2010) J. Biol. Chem. 285:19637-19646. In another approach, one heavy chain comprises D221E, P228E and L368E substitutions and the second heavy chain comprises D221R, P228R, and K409R substitutions, see, e.g. Strop et al., (2012) J. Mol. Biol. 420: 204-219. In another approach, one heavy chain comprises S364H and F405A substitutions and the second heavy chain comprises Y349T and, T394F substitutions, see, e.g. Moore et al., (2011) mAbs 3: 546-557. In another approach, one heavy chain comprises a H435R substitution and the second heavy chain optionally may or may not comprise a substitution, see, e.g. U.S. Pat. No. 8,586,713. When such hetero-multimeric antibodies have Fc regions derived from a human IgG2 or IgG4, the Fc regions of these antibodies can be engineered to contain amino acid modifications that permit CD16 binding. In some embodiments, the antibody may comprise mammalian antibody-type N-linked glycosylation at residue N297 (Kabat EU numbering).

[0368] In some embodiments, a multispecific protein comprises one or more amino acid modifications (e.g. substitutions) in a CH3 domain that affect binding to an affinity purification medium, e.g. Protein A. Introduction into one of the CH3 domains of mutations that diminish binding to Protein A can be used to distinguish unwanted chain pairings from the desired protein. For example, mutations can be introduced at amino acids H435 and Y436 (Kabat EU numbering), for example H435R and Y436F. In one embodiment, in a multispecific protein that has a dimeric Fc domain modified to retain binding to CD16A, a first Fc monomer (e.g. on one of the polypeptide chains) comprises an amino acid sequence at least 90%, 95% or 99% identical to SEQ ID NO: 161 and a second Fc monomer (e.g. on another of the polypeptide chains) comprises an amino acid sequence at least 90%, 95% or 99% identical to SEQ ID NO: 162. Optionally, each of the Fc monomers is fused at its N-terminus to the hinge amino acid sequence of SEQ ID NO: 166.

[0369] In some embodiments, one or more pairs of disulfide bonds such as A287C and L306C, V259C and L306C, R292C and V302C, and V323C and 1332C are introduced into the Fc region to increase stability, for example further to a loss of stability caused by other Fc modifications. Additional example includes introducing K3381, A339K, and K340S mutations to enhance Fc stability and aggregation resistance (Gao et al, 2019 Mol Pharm. 2019; 16:3647).

[0370] In some embodiments, where a multispecific protein is intended to have reduced binding to a human Fc gamma receptor. In some embodiments, where a multispecific protein is intended to have reduced binding to a human CD16A polypeptide (and optionally further reduced binding to CD32A, CD32B and/or CD64), the Fc domain is a human IgG4 Fc domain, optionally further wherein the Fc domain comprises a S228P mutation to stabilize the hinge disulfide. In one embodiment, the Fc domain has an amino acid sequence at least 90%, 95% or 99% identical to a human IgG4 Fc domain, optionally further comprising a Kabat S228P mutation.

[0371] In embodiments, where a multispecific protein is intended to have reduced binding to human CD16A polypeptide (and optionally further reduced binding to CD32A, CD32B and/or CD64), a CH2 and/or CH3 domain (or Fc domain comprising same) may comprise a modification to decrease or abolish binding to FcγRIIIA (CD16). For example, CH2 mutations in a Fc domain dimer proteins at reside N297 (Kabat numbering) can substantially eliminate CD16A binding. However the person of skill in the art will appreciate that other configurations can be implemented. For example, substitutions into human IgG1 or IgG2 residues at positions 233-236 and/or residues at positions 327, 330 and 331 were shown to greatly reduce binding to Fcγ receptors and thus ADCC and CDC. Furthermore, Idusogie et al. (2000) J. Immunol. 164(8):4178-84 demonstrated that alanine substitution at different positions, including K322, significantly reduced complement activation.

[0372] In one embodiment, the asparagine (N) at Kabat heavy chain residue 297 can be substituted by a residue other than an asparagine (e.g. a glutamine, a residue other than glutamine, for example a serine).

[0373] In one embodiment, an Fc domain modified to reduce binding to CD16A comprises a substitution in the Fc domain at Kabat residues 234, 235 and 322. In one embodiment, the protein comprises a substitution in the Fc domain at Kabat residues 234, 235 and 331. In one embodiment, the protein comprises a substitution in the Fc domain at Kabat residues 234, 235, 237 and 331. In one embodiment, the protein comprises a substitution in the Fc domain at Kabat residues 234, 235, 237, 330 and 331. In one embodiment, the Fc domain is of human IgG1 subtype. Amino acid residues are indicated according to EU numbering according to Kabat.

[0374] In one embodiment, an Fc domain modified to reduce binding to CD16A comprises an amino acid modification (e.g. substitution) at one or more of Kabat residue(s) 233-236, optionally one or more of residues 233-237, or at one, two or three of residues 234, 235 and/or 237, and an amino acid modification (e.g. substitution) at Kabat residue(s) 330 and/or 331. One example of such an Fc domain comprises substitutions at Kabat residues L234, L235 and P331 (e.g., L234A/L235E/P331S or (L234F/L235E/P331S). Another example of such an Fc domain comprises substitutions at Kabat residues L234, L235, G237 and P331 (e.g., L234A/L235E/G237A/P331S). Another example of such an Fc domain comprises substitutions at Kabat residues L234, L235, G237, A330 and P331 (e.g., L234A/L235E/G237A/A330S/P331S). In one embodiment, an antibody comprises an human IgG1 Fc domain comprising L234A/L235E/N297X/P331S substitutions, L234F/L235E/N297X/P331S substitutions, L234A/L235E/G237A/N297X/P331S substitutions, or L234A/L235E/G237A/N297X/A330S/P331S substitutions, wherein X can be any amino acid other than an asparagine. In one embodiment, X is a glutamine; in another embodiment, X is a residue other than a glutamine (e.g. a serine).

[0375] In one embodiment, an Fc domain that has low or reduced binding to CD16A comprises a human IgG4 Fc domain, wherein the Fc domain has the amino acid sequence below (human IgG4 with S228P substitution), or an amino acid sequence at least 90%, 95% or 99% identical thereto.

[0376] In one embodiment, an Fc domain modified to reduce binding to CD16A comprises the amino acid sequence below, or an amino acid sequence at least 90%, 95% or 99% identical thereto but retaining the amino acid residues at Kabat positions 234, 235 and 331 (underlined):

(SEQ ID NO: 163)
A S T K G P S V F P L A P S S K S T S G G
T A A L G C L V K D Y F P E P V T V S W N
S G A L T S G V H T F P A V L Q S S G L Y
S L S S V V T V P S S S L G T Q T Y I C N
V N H K P S N T K V D K R V E P K S C D K
T H T C P P C P A P E F E G G P S V F L F
P P K P K D T L M I S R T P E V T C V V V
D V S H E D P E V K F N W Y V D G V E V H
N A K T K P R E E Q Y N S T Y R V V S V L
T V L H Q D W L N G K E Y K C K V S N K A
L P A S I E K T I S K A K G Q P R E P Q V
Y T L P P S R E E M T K N Q V S L T C L V
K G F Y P S D I A V E W E S N G Q P E N N
Y K T T P P V L D S D G S F F L Y S K L T
V D K S R W Q Q G N V F S C S V M H E A L
H N H Y T Q K S L S L S P G

[0377] In one embodiment, an Fc domain modified to reduce binding to CD16A comprises the amino acid sequence below, or an amino acid sequence at least 90%, 95% or 99% identical thereto but retaining the amino acid residues at Kabat positions 234, 235, 237, 330 and 331 (underlined):

(SEQ ID NO: 164)
A S T K G P S V F P L A P S S K S T S G G
T A A L G C L V K D Y F P E P V T V S W N
S G A L T S G V H T F P A V L Q S S G L Y
S L S S V V T V P S S S L G T Q T Y I C N
V N H K P S N T K V D K R V E P K S C D K
T H T C P P C P A P E A E G A P S V E L F
P P K P K D T L M I S R T P E V T C V V V
D V S H E D P E V K F N W Y V D G V E V H
N A K T K P R E E Q Y N S T Y R V V S V L
T V L H Q D W L N G K E Y K C K V S N K A
L P S S I E K T I S K A K G Q P R E P Q V
Y T L P P S R E E M T K N Q V S L T C L V
K G F Y P S D I A V E W E S N G Q P E N N
Y K T T P P V L D S D G S F F L Y S K L T
V D K S R W Q Q G N V F S C S V M H E A L
H N H Y T Q K S L S L S P G

[0378] Any of the above Fc domain sequences can optionally further comprise a C-terminal lysine (K), i.e. as in the naturally occurring sequence.

[0379] In certain embodiments herein where binding to CD16 (CD16A) is desired, a CH2 and/or CH3 domain (or Fc domain comprising same) may be a wild-type domain or a domain having CD16 interface residues from the wild-type human IgG1 domain, or may comprise one or more amino acid modifications (e.g. amino acid substitutions) which increase binding to human CD16 and optionally another receptor such as FcRn. Optionally, the modifications will not substantially decrease or abolish the ability of the Fc-derived polypeptide to bind to neonatal Fc receptor (FcRn), e.g. human FcRn. Typical modifications include modified human IgG1-derived constant regions comprising at least one amino acid modification (e.g. substitution, deletions, insertions), and/or altered types of glycosylation, e.g., hypofucosylation. Such modifications can affect interaction with Fc receptors: FcγRI (CD64), FcγRII (CD32), and FcγRIII (CD16). FcγRI (CD64), FcγRIIA (CD32A) and FcγRIII (CD 16) are activating (i.e., immune system enhancing) receptors while FcγRIIB (CD32B) is an inhibiting (i.e., immune system dampening) receptor. A modification may, for example, increase binding of the Fc domain to FcγRIIIa on effector (e.g. NK) cells and/or decrease binding to FcγRIIB. Examples of modifications are provided in PCT publication no. WO2014/044686, the disclosure of which is incorporated herein by reference. Specific mutations (in IgG1 Fc domains) which affect (enhance) FcγRIIIa or FcRn binding are also set forth below.

| Isotype | Species | Modification | Effector Function | Effect of Modification |
|---|---|---|---|---|
| IgG1 | Human | T250Q/M428L | Increased binding to | Increased half-life |
| | | | FcRn | |
| IgG1 | Human | 1M252Y/S254T/T256E+ | Increased binding to | Increased half-life |
| | | H433K/N434F | FcRn | |
| IgG1 | Human | E333A | Increased binding to | Increased ADCC and |
| | | | FcγRIIIa | CDC |
| IgG1 | Human | S239D/1332E or | Increased binding to | Increased ADCC |
| | | S239D/A330L/I332E | FcγRIIIa | |
| IgG1 | Human | P2571/Q311 | Increased binding to | Unchanged half-life |
| | | | FcRn | |
| IgG1 | Human | S239D/I332E/G236A | Increased | Increased macrophage |
| | | | FcγRIIa/FcγRIIb ratio | phagocytosis |

[0380] In some embodiments, the multispecific protein comprises a variant Fc region comprise at least one amino acid modification (for example, possessing 1, 2, 3, 4, 5, 6, 7, 8, 9, or more amino acid modifications) in the CH2 and/or CH3 domain of the Fc region, wherein the modification enhances binding to a human CD16 polypeptide. In other embodiments, the multispecific protein comprises at least one amino acid modification (for example, 1, 2, 3, 4, 5, 6, 7, 8, 9, or more amino acid modifications) in the CH2 domain of the Fc region from amino acids 237-341, or within the lower hinge-CH2 region that comprises residues 231-341. In some embodiments, the multispecific protein comprises at least two amino acid modifications (for example, 2, 3, 4, 5, 6, 7, 8, 9, or more amino acid modifications), wherein at least one of such modifications is within the CH3 region and at least one such modifications is within the CH2 region. Encompassed also are amino acid modifications in the hinge region. In one embodiment, encompassed are amino acid modifications in the CH1 domain, optionally in the upper hinge region that comprises residues 216-230 (Kabat EU numbering). Any suitable functional combination of Fc modifications can be made, for example any combination of the different Fc modifications which are disclosed in any of U.S. Pat. Nos. 7,632,497; 7,521,542; 7,425,619; 7,416,727; 7,371,826; 7,355,008; 7,335,742; 7,332,581; 7,183,387; 7,122,637; 6,821,505 and 6,737,056; and/or in PCT Publications Nos. WO2011/109400; WO 2008/105886; WO 2008/002933; WO 2007/021841; WO 2007/106707; WO 06/088494; WO 05/115452; WO 05/110474; WO 04/1032269; WO 00/42072; WO 06/088494; WO 07/024249; WO 05/047327; WO 04/099249 and WO 04/063351; and/or in Lazar et al. (2006) Proc. Nat. Acad. Sci. USA 103(11): 405-410; Presta, L. G. et al. (2002) Biochem. Soc. Trans. 30(4):487-490; Shields, R. L. et al. (2002) J. Biol. Chem. 26; 277(30):26733-26740 and Shields, R. L. et al. (2001) J. Biol. Chem. 276(9):6591-6604).

[0381] In some embodiments, the multispecific protein comprises an Fc domain comprising at least one amino acid modification (for example, 1, 2, 3, 4, 5, 6, 7, 8, 9, or more amino acid modifications) relative to a wild-type Fc region, such that the molecule has an enhanced binding affinity for human CD16 relative to the same molecule comprising a wild-type Fc region, optionally wherein the variant Fc region comprises a substitution at any one or more of positions 221, 239, 243, 247, 255, 256, 258, 267, 268, 269, 270, 272, 276, 278, 280, 283, 285, 286, 289, 290, 292, 293, 294, 295, 296, 298, 300, 301, 303, 305, 307, 308, 309, 310, 311, 312, 316, 320, 322, 326, 329, 330, 332, 331, 332, 333, 334, 335, 337, 338, 339, 340, 359, 360, 370, 373, 376, 378, 392, 396, 399, 402, 404, 416, 419, 421, 430, 434, 435, 437, 438 and/or 439 (Kabat EU numbering).

[0382] In one embodiment, the multispecific protein comprises an Fc domain comprising at least one amino acid modification (for example, 1, 2, 3, 4, 5, 6, 7, 8, 9, or more amino acid modifications) relative to a wild-type Fc region, such that the molecule has enhanced binding affinity for human CD16 relative to a molecule comprising a wild-type Fc region, optionally wherein the variant Fc region comprises a substitution at any one or more of positions 239, 298, 330, 332, 333 and/or 334 (e.g. S239D, S298A, A330L, 1332E, E333A and/or K334A substitutions), optionally wherein the variant Fc region comprises a substitution at residues S239 and 1332, e.g. a S239D and 1332E substitution (Kabat EU numbering).

[0383] In some embodiments, the multispecific protein comprises an Fc domain comprising N-linked glycosylation at Kabat residue N297. In some embodiments, the multispecific protein comprises an Fc domain comprising altered glycosylation patterns that increase binding affinity for human CD16. Such carbohydrate modifications can be accomplished by, for example, by expressing a nucleic acid encoding the multispecific protein in a host cell with altered glycosylation machinery. Cells with altered glycosylation machinery are known in the art and can be used as host cells in which to express recombinant antibodies to thereby produce an antibody with altered glycosylation. See, for example, Shields, R. L. et al. (2002) J. Biol. Chem. 277:26733-26740; Umana et al. (1999) Nat. Biotech. 17:176-1, as well as, European Patent No: EP 1176195; PCT Publications WO 06/133148; WO 03/035835; WO 99/54342, each of which is incorporated herein by reference in its entirety. In one aspect, the multispecific protein contains one or more hypofucosylated constant regions. Such multispecific protein may comprise an amino acid alteration or may not comprise an amino acid alteration and/or may be expressed or synthesized or treated under conditions that result in hypofucosylation. In one aspect, a multispecific protein composition comprises a multispecific protein described herein, wherein at least 20, 30, 40, 50, 60, 75, 85, 90, 95% or substantially all of the antibody species in the composition have a constant region comprising a core carbohydrate structure (e.g. complex, hybrid and high mannose structures) which lacks fucose. In one embodiment, provided is a multispecific protein composition which is free of N-linked glycans comprising a core carbohydrate structure having fucose. The core carbohydrate will preferably be a sugar chain at Asn297.

[0384] Optionally, a multispecific protein comprising a Fc domain dimer can be characterized by having a binding affinity to a human CD16A polypeptide that is within 1-log of that of a conventional human IgG1 antibody, e.g., as assessed by surface plasmon resonance.

[0385] In one embodiment, the multispecific protein comprising a Fc domain dimer in which an Fc domain is engineered to enhance Fc receptor binding can be characterized by having a binding affinity to a human CD16A polypeptide that is at least 1-log greater than that of a conventional or wild-type human IgG1 antibody, e.g., as assessed by surface plasmon resonance.

[0386] In one embodiment, a multispecific protein comprising a Fc domain dimer can be characterized by having a binding affinity to a human FcRn (neonatal Fc receptor) polypeptide that is within 1-log of that of a conventional human IgG1 antibody, e.g., as assessed by surface plasmon resonance.

[0387] Optionally a multispecific protein comprising a Fc domain dimer can be characterized by a Kd for binding (monovalent) to a human Fc receptor polypeptide (e.g., CD16A) of less than 10⁻⁵ M (10 μmolar), optionally less than 10⁻⁶ M (1 μmolar), as assessed by surface plasmon resonance (e.g. as in the Examples herein, SPR measurements performed on a Biacore T100 apparatus (Biacore GE Healthcare), with bispecific antibodies immobilized on a Sensor Chip CM5 and serial dilutions of soluble CD16 polypeptide injected over the immobilized bispecific antibodies.

[0388] Cytokine Receptor ABD

[0389] The antigen binding domain that binds to a cytokine receptor on NK cells (cytokine receptor ABD) can advantageously comprise a suitable cytokine polypeptide or polypeptide fragment such that the cytokine receptor ABD binds the cytokine receptor on the surface of an NK cell. The cytokine can for example be a full-length wild-type IL-2, IL-15, IL-21, IL-7, IL-27, IL-12, IL-18, IFN-α or IFN-β polypeptide, a fragment thereof sufficient to bind to the NK cell receptor for such cytokine, or a variant of any of the foregoing. The cytokine molecule can be a fragment comprising at least 20, 30, 40, 50, 60, 70, 80 or 100 contiguous amino acids of a human cytokine, wherein the cytokine retains the ability to bind its cytokine receptor present on the surface of an NK cell. In certain embodiments, the cytokine is a variant of a human cytokine comprising one or more amino acid modifications (e.g. amino acid substitutions) compared to the wild-type human cytokine, for example to decrease binding affinity to a receptor present on non-NK cells, for example Treg cells, CD4 T cells, CD8 T cells. The cytokine can for example be a type I cytokine and a member of the common cytokine receptor gamma-chain (cg-chain) cytokine family, that signals via a heteromultimeric or heterdimeric receptor complex comprised of a receptor subunit (e.g., IL-2Rβ/IL-15Rβ or IL-21R) subunit that associates with the common gamma-chain (CD132).

[0390] In one embodiment, the multispecific proteins that binds to NKp46 and optionally further CD16A incorporates a cytokine (or fragment of variant thereof) which is modified to attenuate (reduce) binding affinity at the cytokine receptor expressed on NK cells, in comparison to the human wild-type cytokine counterpart. The modified cytokine (or fragment of variant thereof) retains partial activity and/or binding affinity at the cytokine receptor expressed on NK cells, in comparison to the human wild-type cytokine counterpart. In one embodiment, the cytokine retains at least 5%, 10%, 20% or 50% of the ability of a wild-type cytokine counterpart to induce signaling through its receptor on NK cells.

[0391] In one embodiment, the multispecific proteins that binds to NKp46 and optionally further CD16A permits the incorporation of a wild-type cytokine (or fragment of variant thereof) that retain substantially full activity and/or binding affinity at the cytokine receptor expressed on NK cells, in comparison to the human wild-type cytokine counterpart. In one embodiment, the cytokine is a wild-type cytokine or fragment thereof, or is a modified cytokine, wherein the cytokine is does not have a substantially reduced ability to induce signaling and/or does not have a substantially reduced binding affinity at its receptor on NK cells (e.g. CD122, IL-21R, IL-7Ra, IL-27Ra, IL-12R, IL-18R). In one embodiment, the cytokine does not comprise a modification (e.g., substitution, deletion, etc.) that substantially reduces its ability to induce signaling through its receptor on NK cells (e.g. CD122, IL-21R, IL-7Ra, IL-27Ra, IL-12R, IL-18R). In one embodiment, the cytokine retains at least 80%, 90% of the ability of a wild-type cytokine counterpart to induce signaling through its receptor on NK cells (e.g. CD122, IL-21R, IL-7Ra, IL-27Ra, IL-12R, IL-18R). Optionally, signaling is assessed by bringing the cytokine (e.g. as a recombinant protein domain or within a multispecific protein of the disclosure) into contact with an NK cell and measuring signaling, e.g. measuring STAT phosphorylation in the NK cells.

[0392] In some embodiments, when the exemplary anti-NKp46 VH/VL pairs disclosed herein having a KD for NKp46 in the range of about 15 nM, or functionally conservative variants thereof, are used in the multispecific proteins, the cytokine or cytokine receptor ABD (either as a free cytokine or as incorporated into a multispecific protein) can be specified as binding its receptor, as determined by SPR, with a binding affinity (KD) of 200 nM or less, 100 nM or less, 50 nM or less or 25 nM or less. In one embodiment, the cytokine or cytokine receptor ABD binds its receptor, as determined by SPR, with a binding affinity (KD) that is 1 nM or higher than 1 nM, optionally that is higher than 10 nM optionally that is higher than 15 nM. In one embodiment, the cytokine or cytokine receptor ABD binds its receptor, as determined by SPR, with a binding affinity (KD) between about 1 nm and about 200 nm, optionally) between about 1 nm and about 100 nm optionally between about 10 nM and about 200 nM, optionally between about 10 nM and about 100 nM optionally between about 15 nM and about 100 nM.

[0393] When the cytokine-binding ABD is a CD122-binding ABD, the ABD can be or comprise a suitable interleukin-2 (IL-2) polypeptide such that the CD122 ABD binds CD122. As exemplified herein, the ABD is advantageously a variant or modified IL-2 polypeptide that has reduced binding to CD25 (IL-2Rα) (e.g. reduced or abolished binding affinity, for example as determined by SPR) compared to a wild-type human interleukin-2. Such a variant or modified IL-2 polypeptide is also referred herein to as an “IL2v” or a “not-alpha IL-2”. The CD122-binding ABD can optionally be specified to have a binding affinity for human CD122 that is substantially equivalent to that of wild-type human IL-2, or that is reduced compared to wild-type human IL-2. The CD122-binding ABD can optionally be specified to have an ability to induce CD122 signaling and/or binding affinity for CD122 that is substantially equivalent to that of wild-type human IL-2. In one embodiment, the CD122-binding ABD has a reduction in binding affinity for CD25 that is greater than the reduction in binding affinity for CD122, for example a reduction of at least 1-log, 2-log or 3-log in binding affinity for CD25 and a reduction in binding affinity for CD122 that is less than 1-log.

[0394] For example, a heteromultimeric multispecific protein can be specified as being capable of binding to NKp46 and CD122, and optionally further CD16A, on an NK cell, and which is capable of potentiating NK cell cytotoxicity toward a target cell expressing an antigen of interest, and comprising:
[0395] (a) an ABD that binds to an antigen of interest,
[0396] (b) an ABD that binds to a human NKp46 polypeptide,
[0397] (c) an Fc domain or portion thereof capable of binding FcRn, and optionally further to CD16A, and
[0398] (d) an ABD that binds a human CD122 polypeptide, wherein the ABD is placed at the C-terminus of the polypeptide chain which comprises such ABD, optionally wherein such ABD comprises an IL-2 polypeptide or portion thereof that binds CD122 and displays reduced binding affinity for human CD25 respectively, compared to a human wild-type IL-2 polypeptide. The ABD that binds CD122 can thus be placed for example C-terminal and/or adjacent to the Fc domain and/or ABD that binds NKp46 on a polypeptide chain.

[0399] IL-2 is believed to bind IL-2Rβ (CD122) in its form as a monomeric IL-2 receptor (IL-2R), followed by recruitment of the IL-2Rγ (CD132; also termed common γ chain) subunit. In cells that do not express CD25 at their surface, binding (e.g. reduced binding) to CD122 can therefore optionally be specified as being binding in or to a CD122:CD132 complex. The CD122 (or CD122:CD132 complex) can optionally be specified as being present at the surface of an NK cell. In cells that express CD25 at their surface, IL-2 is believed to bind CD25 (IL-2Rα) in its form as a monomeric IL-2 receptor, followed by association of the subunits IL-2Rβ and IL-2Rγ. Binding (e.g. reduced binding, partially reduced binding) to CD25 can therefore optionally be specified as being binding in or to a CD25:CD122 complex or a CD25:CD122:CD132 complex.

[0400] In a multispecific protein herein, the multispecific protein can optionally be specified as being configured and/or in a conformation (or capable of adopting a conformation) in which the CD122 ABD (e.g. IL2v) is capable of binding to CD122 at the surface of a cell (e.g. an NK cell, a CD122+CD25− cell) when the multispecific protein is bound to NKp46 (and optionally further to CD16) at the surface of said cell. Optionally further, the multispecific protein:CD122 complex is capable of binding to CD132 at the surface of said cell.

[0401] The CD122 ABD or IL2v can be a modified IL-2 polypeptide, for example a monomeric IL-2 polypeptide modified by introducing one more amino acid substitutions, insertions or deletions that decrease binding to CD25, with or without a decrease in binding to CD122.

[0402] In some embodiments, where binding to CD25 is sought to be selectively decreased, a IL-2 polypeptide can be modified by binding or associating it with one or more other additional molecules such as polymers or (poly)peptides that result in a further decrease of or abolished binding to CD25. For example a wild-type or mutated IL-2 polypeptide can be modified or further modified by binding to it another moiety that shields, masks, binds or interacts with CD25-binding site of human IL-2, thereby decreasing binding to CD25. In some examples, molecules such as polymers (e.g. PEG polymers) are conjugated to an IL-2 polypeptide to shield or mask the epitope on IL-2 that is bound by CD25, for example by introduction (e.g. substitution) to install an amino acid containing a dedicated chemical hook at a specific site on the IL-2 polypeptide. In other examples, a wild-type or variant IL-2 polypeptide is bound to anti-IL-2 monoclonal antibody or antibody fragment that binds or interacts with CD25-binding site of human IL-2, thereby decreasing binding to CD25.

[0403] In any embodiment, an IL2 polypeptide can be a full-length IL-2 polypeptide or it can be an IL-2 polypeptide fragment, so long as the fragment or IL2v that comprises it retains the specified activity (e.g. retaining at least partial CD122 binding, compared to wild-type IL-2 polypeptide).

[0404] As shown herein, an IL2v polypeptide can advantageously comprise an IL-2 polypeptide comprising one or more amino acid mutations designed to reduce its ability to bind to human CD25 (IL-2Rα), while retaining at least at least some, or optionally substantially full, ability to bind human CD122.

[0405] Various IL2v or not-alpha IL-2 moieties have been described which reduce the activation bias of IL-2 on CD25+ cells. Such IL2v reduce binding to IL-2Rα and maintain at least partial binding to IL-2Rβ. Several IL2v polypeptides have been described, many having mutations in amino acid residue regions 35-72 and/or 79-92 of the IL-2 polypeptide. For example, decreased affinity to IL-2Rα may be obtained by substituting one or more of the following residues in the sequence of a wild-type IL-2 polypeptide: R38, F42, K43, Y45, E62, P65, E68, V69, and L72 (amino acid residue numbering is with reference to the mature IL-2 polypeptide shown in SEQ ID NO: 404).

[0406] The wild-type mature human IL-2 protein and a wild-type mature IL-2p protein fragment lacking the three first residues APT are shown below in SEQ ID NOS: 404 and 405, respectively:

Wild-type mature human IL-2
(SEQ ID NO: 404)
[sequence omitted]
Wild-type mature IL-2p:
(SEQ ID NO: 405)
SSSTKKTQLQLEHLLLDLQMILNGINNYKNPKLTRMLTFKFYMPKKATEL
KHLQCLEEELKPLEEVLNLAQSKNFHLRPRDLISNINVIVLELKGSETTF
[sequence omitted]

[0407] An exemplary IL2v (also referred to herein as IL2v in the Examples) can have the amino acid of wild-type IL-2 with the five amino acid substitutions T3A, F42A, Y45A, L72G and C125A, as shown below, optionally further with deletion of the three N-terminal residues APA:

(SEQ ID NO: 406)
APASSSTKKTQLQLEHLLLDLQMILNGINNYKNPKLTRMLTAKFAMPKKA
TELKHLQCLEEELKPLEEVLNGAQSKNFHLRPRDLISNINVIVLELKGSE
TTFMCEYADETATIVEFLNRWITFAQSIISTLT

[0408] As few as one or two mutations can reduce binding to IL-2Rα and L-2Rβ. For example, as exemplified in the multispecific proteins herein, the IL2v polypeptide having two amino acid substitutions R38A and F42K in the wild-type IL-2p amino acid sequence displayed suitable reduced binding to IL-2Rα, with retention of binding to IL-2Rβ resulting in highly active multispecific proteins, referred to herein as IL2v2.

IL2v2 (R38A/F42K substitutions):
(SEQ ID NO: 407)
SSSTKKTQLQLEHLLLDLQMILNGINNYKNPKLTAMLTKKFY
MPKKATELKHLQCLEEELKPLEEVLNLAQSKNFHLRPRDLIS
NINVIVLELKGSETTFMCEYADETATIVEFLNRWITFCQSII
STLT

[0409] In one embodiment, an IL2v polypeptide has the wild-type IL-2p amino acid sequence with the three amino acid substitutions R38A, F42K and T41A, as shown below, referred to herein as IL2v3:

IL2v3 (R38A/T41A/F42K substitutions):
(SEQ ID NO: 408)
SSSTKKTQLQLEHLLLDLQMILNGINNYKNPKLTAMLAKKFY
MPKKATELKHLQCLEEELKPLEEVLNLAQSKNFHLRPRDLIS
NINVIVLELKGSETTFMCEYADETATIVEFLNRWITFCQSII
STLT

[0410] Thus, in one embodiment, an IL2 variant comprises at least one or at least two amino acid modifications (e.g. substitution, insertion, deletion) compared to a human wild type IL-2 polypeptide. In one embodiment, an IL2v comprises a R38 substitution (e.g. R38A) and an F42 substitution (e.g., F42K), compared to a human wild type IL-2 polypeptide. In one embodiment, an IL2v comprises a R38 substitution (e.g. R38A), an F42 substitution (e.g., F42K) and a T41 substitution (e.g. T41A), compared to a human wild type IL-2 polypeptide. In one embodiment, an IL2v comprises a T3 substitution (e.g. T3A), an F42 substitution (e.g., F42A), a Y45 substitution (e.g. Y45A), a L72 substitution (e.g. L72G) and a C125 substitution (e.g. C125A), compared to a human wild type IL-2 polypeptide. Optionally the IL2v comprises an amino acid sequence identical to or at least 70%, 80%, 90%, 95%, 98% or 99% identical to the polypeptide of SEQ ID NOS: 404-409. Optionally the IL2v comprises a fragment of a human IL-2 polypeptide, wherein the fragment has an amino sequence identical to or at least 70%, 80%, 90%, 95%, 98% or 99% identical to a contiguous sequence of 40, 50, 60, 70 or 80 amino acids of the polypeptide of SEQ ID NOS: 404-409.

[0411] Any combination of the positions can be modified. In some embodiments, the IL-2 variant comprises two or more modification. In some embodiments, the IL-2 variant comprises three or more modification. In some embodiments, the IL-2 variant comprises four, five, or six or more modifications.

[0412] IL2 variant polypeptides can for example comprise two, three, four, five, six or seven amino acid modifications (e.g. substitutions). For example, U.S. Pat. No. 5,229,109, the disclosure of which is incorporated herein by reference, provides a human IL2 polypeptide having a R38A and F42K substitution. U.S. Pat. No. 9,447,159, the disclosure of which is incorporated herein by reference, describes human IL2 polypeptides having substitutions T3A, F42A, Y45A, and L72G substitutions. U.S. Pat. No. 9,266,938, the disclosure of which is incorporated herein by reference, describes human IL2 polypeptides having substitutions at residue L72 (e.g. L72G, L72A, L72S, L72T, L72Q, L72E, L72N, L72D, L72R, and L72K), residue F42 (e.g. F42A, F42G, F42S, F42T, F42Q, F42E, F42N, F42D, F42R, and F42K); and at residue Y45 (e.g., Y45A, Y45G, Y45S, Y45T, Y45Q, Y45E, Y45N, Y45D, Y45R and Y45K), including for example the triple mutation F42A/Y45A/L72G to reduce or abolish the affinity for IL-2Rα receptor. Yet further WO2020/057646, the disclosure of which is incorporated herein by reference, relates to amino acid sequence of IL-2v polypeptides comprising amino acid substitutions in various combinations among amino acid residues K35, T37, R38, F42, Y45, E61 and E68. Yet further, WO2020252418, the disclosure of which is incorporated herein by reference, relates to amino acid sequence of IL-2v polypeptides having at least one amino acid residues position R38, T41, F42, F44, E62, P65, E68, Y107, or S125 substituted with another amino acid, for example wherein the amino acid substitution is selected from the group consisting of: the substitution of L19D, L19H, L19N, L19P, L19Q, L19R, L19S, L19Y at position 19, the substitution of R38A, R38F, R38G at position 38, the substitution of T41A, T41G, and T41V at position 41, the substitution of F42A at position 42, the substitution of F44G and F44V at position 44, the substitution of E62A, E62F, E62H, and E62L at position 62, the substitution of P65A, P65E, P65G, P65H, P65K, P65N, P65Q, P65R at position 65, the substitution of E68E, E68F, E68H, E68L, and E68P at position 68, the substitution of Y107G, Y107H, Y107L and Y107V at position 107, and the substitution of S125I at position 125, the substitution of Q126E at position 126. Numbering of positions is with respect to Wild-type mature human IL-2.

[0413] A modified IL-2 can optionally be specified as exhibiting a KD for binding to CD25 or to a CD25:CD122:CD132 complex that is decreased by at least 1-log, optionally at least 2-log, optionally at least 3-log, compared to a wild-type human IL-2 polypeptide (e.g. comprising the amino acid sequence of SEQ ID NO: 404). A modified IL-2 can optionally be specified as exhibiting less than 20%, 30%, 40% or 50% of binding affinity to CD25 or to a CD25:CD122:CD132 complex compared to a wild-type human IL-2 polypeptide. An IL2 can optionally be specified as exhibiting at least 50%, 70%, 80% or 90% of binding affinity to CD122 or to a CD122:CD132 complex compared to a wild-type human IL-2 polypeptide. In some embodiments, an IL2 exhibits at least 50%, 60%, 70% or 80% but less than 100% of binding affinity to CD122 or to a CD122:CD132 complex compared to a wild-type human IL-2 polypeptide. In some embodiments, an IL2v exhibits less than 50% of binding affinity to CD25 and at least 50%, 60%, 70% or 80% of binding affinity to CD122, compared to wild-type IL-2 polypeptide.

[0414] Differences in binding affinity of wild-type and disclosed mutant polypeptide for CD25 and CD122 and complexes thereof can be measured, e.g., in standard surface plasmon resonance (SPR) assays that measure affinity of protein-protein interactions familiar to those skilled in the art.

[0415] Exemplary IL2 variant polypeptides have one or more, two or more, or three or more CD25-affinity-reducing amino acid substitutions relative to the wild-type mature IL-2 polypeptide having an amino acid sequence of SEQ ID NO: 404. In one embodiment, the exemplary IL2v polypeptides comprise one or more, two or more, or three or more substituted residues selected from the following group: Q11, H16, L18, L19, D20, D84, S87, Q22, R38, T41, F42, K43, Y45, E62, P65, E68, V69, L72, D84, S87, N88, V91, 192, T123, Q126, S127, 1129, and S130.

[0416] In one embodiment, the exemplary IL2 variant polypeptide has one, two, three, four, five or more of amino acid residues position R38, T41, F42, F44, E62, P65, E68, Y107, or S125 substituted with another amino acid.

[0417] In one embodiment, decreased affinity to CD25 or a protein complex comprising such (e.g., a CD25:CD122:CD132 complex) may be obtained by substituting one or more of the following residues in the sequence of the wild-type mature IL-2 polypeptide: R38, F42, K43, Y45, E62, P65, E68, V69, and L72.

[0418] In one embodiment, a CD122 ABD or IL-2 polypeptide is an IL-2 mimetic polypeptide. Synthetic IL-2/IL-15 polypeptide mimics can be computationally designed to bind to CD122, but not to CD25, for example as described in Silva et al, (2019) Nature 565(7738): 186-191 and WO2020/005819, the disclosures of which are incorporated herein by reference, also provides IL-2 and IL-15 mimetic polypeptides that bind CD122 but not CD25.

[0419] For example, an IL-2 mimetic polypeptide can be characterized as a non-naturally occurring polypeptide comprising domains X₁, X₂, X₃, and X₄, wherein:
[0420] (a) X, is a peptide comprising the amino acid sequence at least 85% identical to EHALYDAL (SEQ ID NO: 409);
[0421] (b) X₂ is a helical-peptide of at least 8 amino acids in length;
[0422] (c) X₃ is a peptide comprising the amino acid sequence at least 85% identical to YAFNFELI (SEQ ID NO: 410);
[0423] (d) X₄ is a peptide comprising the amino acid sequence at least 85% identical to ITILQSWIF (SEQ ID NO: 411);
[0424] wherein X₁, X₂, X₃, and X₄ may be in any order in the polypeptide,
[0425] wherein amino acid linkers may be present between any of the domains, and wherein the polypeptide binds to CD122 (or to the CD122:CD132 heterodimer). Optionally, the polypeptides bind the CD122:CD132 heterodimer with a binding affinity of 200 nM or less, 100 nM or less, 50 nM or less or 25 nM or less.

[0426] In one aspect, the invention provides non-naturally occurring polypeptides comprising domains X₁, X₂, X₃, and X₄, wherein:
[0427] (a) X₁ is a peptide comprising the amino acid sequence EHALYDAL (SEQ ID NO: 409);
[0428] (b) X₂ is a helical-peptide of at least 8 amino acids in length;
[0429] (c) X₃ is a peptide comprising the amino acid sequence YAFNFELI (SEQ ID NO: 410);
[0430] (d) X₄ is a peptide comprising the amino acid sequence ITILQSWIF (SEQ ID NO:411);
[0431] wherein X₁, X₂, X₃, and X₄ may be in any order in the polypeptide,
[0432] wherein amino acid linkers may be present between any of the domains, and wherein the polypeptide binds to CD122 (or to the CD122:CD132 heterodimer). Optionally, the polypeptides bind the CD122:CD132 heterodimer with a binding affinity of 200 nM or less, 100 nM or less, 50 nM or less or 25 nM or less, optionally between about 1 nm and about 100 nm, optionally between about 10 nM and about 200 nM, optionally between about 10 nM and about 100 nM optionally between about 15 nM and about 100 nM.

[0433] In one example, X₁, X₃, and X₄ may be any suitable length, meaning each domain may contain any suitable number of additional amino acids other than the peptides of SEQ ID NOS: 409, 410 and 411, respectively. In one embodiment, X₁ is a peptide comprising the amino acid sequence at least 25%, 27%, 30%, 35%, 40%, 45%, 50%, 55%, 60%, 65%, 70%, 75%, 80%, 85%, 90%, 95%, 98%, or 100% identical along its length to the peptide PKKKIQLHAEHALYDALMILNI (SEQ ID NO: 412); X₃ is a peptide comprising the amino acid sequence at least 25%, 27%, 30%, 35%, 40%, 45%, 50%, 55%, 60%, 65%, 70%, 75%, 80%, 85%, 90%, 95%, 98%, or 100% identical along its length the amino acid sequence LEDYAFNFELILEEIARLFESG (SEQ ID NO: 413); and X₄ is a peptide comprising the amino acid sequence at least 25%, 27%, 30%, 35%, 40%, 45%, 50%, 55%, 60%, 65%, 70%, 75%, 80%, 85%, 90%, 95%, 98%, or 100% identical along its length to the amino acid sequence EDEQEEMANAIITILQSWIFS (SEQ ID NO:414).

[0434] In one example, a computationally designed synthetic IL-2 polypeptide or mimetic (or CD122 ABD) comprises the amino acid sequence (neoleukin) shown below (with or without a (GS₄)₃ domain linker:

(SEQ ID NO: 415)
PKKKIQLHAEHALYDALMILNIVKTNSPPAEEKLEDYAFNFELILEEIAR
LFESGDQKDEAEKAKRMKEWMKRIKTTASEDEQEEMANAIITILQSWIFS
or
(SEQ ID NO: 416)
GSSSSGSSSSGSSSSPKKKIQLHAEHALYDALMILNIVKTNSPPAEEKLE
DYAFNFELILEEIARLFESGDQKDEAEKAKRMKEWMKRIKTTASEDEQEE
MANAIITILQSWIFS.

[0435] In yet other examples, an IL-2 polypeptide is modified by connecting, fusing, binding or associating it with one or more other additional compounds, chemical compounds, polymer (e.g. PEG), or polypeptides or polypeptide chains that result in a decrease of binding to CD25. For example a wild-type IL-2 polypeptide or fragment thereof can be modified by binding to it a CD25 binding peptide or polypeptide, including but not limited to an anti-IL-2 monoclonal antibody or antibody fragment thereof that binds or interacts with CD25-binding site of human IL-2, thereby decreasing binding to CD25.

[0436] In one example, an IL-2 further comprises a receptor domain, e.g., a cytokine receptor domain. In one embodiment, the cytokine molecule comprises an IL-2 receptor, or a fragment thereof (e.g., an IL-2 binding domain of an IL-2 receptor alpha). In one example, a CD25-derived polypeptide is fused to an IL-2 polypeptide, as described in Lopes et al, J Immunother Cancer. 2020; 8(1), the disclosure of which is incorporated herein by reference. In one example, the IL-2 is a variant fusion protein comprising a circularly permuted (cp) IL-2 fused to a CD25 polypeptide (see e.g., PCT publication no. WO2020/249693, the disclosure of which is incorporated herein by reference). Where the CD122 ABD comprises a circularly permuted (cp) IL-2 fused to a CD25 polypeptide, the ABD can comprise a cpIL-2:IL-2Ra polypeptide or protein of described in PCT publication no. WO2013/184942, the disclosure of which is incorporated herein by reference. For example, the permuted (cp) IL-2 variant fused to a CD25 polypeptide can have the amino acid sequence:

(SEQ ID NO: 417)
SKNFHLRPRDLISNINVIVLELKGSETTFMCEYADETATIVEFLNRWITF
SQSIISTLTGGSSSTKKTQLQLEHLLLDLQMILNGINNYKNPKLTRMLTF
KFYMPKKATELKHLQCLEEELKPLEEVLNLAQGSGGGSELCDDDPPEIPH
ATFKAMAYKEGTMLNCECKRGFRRIKSGSLYMLCTGNSSHSSWDNQCQCT
SSATRNTTKQVTPQPEEQKERKTTEMQSPMQPVDQASLPGHCREPPPWEN
EATERIYHFWGQMVYYQCVQGYRALHRGPAESVCKMTHGKTRWTQPQLIC
TG,

or an amino acid sequence having sequence identity that is about 75%, 80%, 85%, 90%, 91%, 92%, 93%, 94%, 95%, 96%, 97%, 98%, 99% or higher over a contiguous stretch of about 20 amino acids up to the full length of SEQ ID NO: 417.

[0437] In one example, IL-2 is associated with a specific anti-IL-2 monoclonal antibody (mAb), thus forming an IL-2/anti-IL-2 mAb complex (IL-2cx). Such complexes have been shown to overcome the CD25 binding (Boyman et al., Science 311, 1924-1927 (2006). An exemplary anti-IL2 antibody is antibody NARA1. PCT publication no. WO2017/122130, the disclosure of which is incorporated herein by reference, describes fusion proteins in which flexible linkers are used to connect IL-2 to the variable region of the light or heavy chain of NARA1. Sahin et al. (Nature Communications volume 11, Article number: 6440 (2020)) describe an improved construct in which IL-2 is brought into contact with and bound to the complementarity-determining region 1 of the light chain (L-CDR1) of NARA1, which resulted in a protein complex in which the IL-2 is bound to its antigen-binding groove on the antibody fragment (or the polypeptide chain(s) of the fragment).

[0438] In other examples, an IL-2 polypeptide or fragment thereof can be modified by binding to it a moiety of interest (e.g. a compound, chemical compounds, polymer, linear or branched PEG polymer), covalently attached to a natural amino acid or to an unnatural amino acid installed at a selected position. Such a modified interleukin 2 (IL-2) polypeptide can comprise at least one unnatural amino acid at a position on the polypeptide that reduces binding between the modified IL-2 polypeptide and CD25 but retains significant binding to the CD122:CD132 signaling complex, wherein the reduced binding to CD25 is compared to binding between a wild-type IL-2 polypeptide and CD25. An unnatural amino acid can be positioned at any one or more of residues K35, T37, R38, T41, F42, K43, F44, Y45, E60, E61, E62, K64, P65, E68, V69, N71, L72, M104, C105, and Y107 of IL-2. As disclosed in PCT publication nos. WO2019/028419 and WO2019/014267, the disclosures of which are incorporated herein by reference, the unnatural amino acid can be incorporated into the modified IL-2 polypeptide by an orthogonal tRNA synthetase/tRNA pair. The unnatural amino acid can for example comprise a lysine analogue, an aromatic side chain, an azido group, an alkyne group, or an aldehyde or ketone group. The modified IL-2 polypeptide can then be covalently attached to a water-soluble polymer, a lipid, a protein, or a peptide through the unnatural amino acid. Examples of suitable polymers include polyethylene glycol (PEG), poly(propylene glycol) (PPG), copolymers of ethylene glycol and propylene glycol, poly(oxyethylated polyol), poly(olefinic alcohol), poly(vinylpyrrolidone), poly(hydroxyalkylmethacrylamide), poly(hydroxyalkylmethacrylate), poly(saccharides), poly(a-hydroxy acid), poly(vinyl alcohol), polyphosphazene, polyoxazolines (POZ), poly(N-acryloylmorpholine), or a combination thereof, or a polysaccharide such as dextran, polysialic acid (PSA), hyaluronic acid (HA), amylose, heparin, heparan sulfate (HS), dextrin, or hydroxyethyl-starch (HES).

[0439] In some examples, an exemplary IL2v/not-alpha IL-2 conjugate can comprise a full-length or fragment of an IL-2 polypeptide in which an amino acid residue in the IL-2 polypeptide (e.g. a residue at position selected from K35, F42, F44, K43, E62, P65, R38, T41, E68, Y45, V69, and L72) is replaced by a natural or non-natural amino acid residue attached to a polymer via a chemical linker. The polymer can be a PEG polymer, e.g. a PEG group having an average molecular weight selected from 5 kDa, 10 kDa, 15 kDa, 20 kDa, 25 kDa, 30 kDa, 35 kDa, 40 kDa, 45 kDa, 50 kDa, and 60 kDa.

[0440] A modified IL2 polypeptide can comprising at least one unnatural amino acid at a position on the polypeptide that reduces binding between the modified IL-2 polypeptide and CD25 but retains significant binding with CD122:CD132 signaling complex to form a CD122:CD132 complex, wherein the reduced binding to CD25 is compared to binding between a wild-type IL-2 polypeptide and CD25 An exemplary 112v/not-alpha IL-2 conjugate is THOR-707 (Synthorx inc).

[0441] For example, as described in PCT publication no. WO2020/163532, the disclosure of which is incorporated herein by reference, an amino acid residue in the IL-2 conjugate is replaced by the structure of Formula (I):

[chemical structure]

[0442] wherein:
[0443] Z is CH2 and Y is

[chemical structure]

[0444] Y is CH2 and Z is

[chemical structure]

[0445] Z is CH2 and Y is

[chemical structure]

[0446] or,
[0447] Y is CH2 and Z is

[chemical structure]

[0448] and wherein, W is a PEG group having an average molecular weight selected from 5 kDa, 10 kDa, 15 kDa, 20 kDa, 25 kDa, 30 kDa, 35 kDa, 40 kDa, 45 kDa, 50 kDa, and 60 kDa; and
[0449] X has the structure:

[chemical structure]

[0450] In one embodiment, an IL-2 comprises a releasable polymer (e.g. a releasable PEG polymer), e.g. the IL-2 is conjugated, linked or bound to a releasable polymer that results in a decrease in CD25 binding in vivo and/or in vitro. Example of such modified IL-2 include bempegaldesleukin or RSLAIL-2 (Nektar Therapeutics inc.), which exhibits about a 60-fold decrease in affinity to CD25 relative to IL-2, but only about a 5-fold decrease in affinity CD122 relative to IL-2. “Bempegaldesleukin” (CAS No. 1939126-74-5) is an IL-2 in which human interleukin-2 (des-1-alanine, 125-serine), is N-substituted with an average of six [(2,7-bis{[methylpoly(oxyethylene)iokD]carbamoyl}-9H-fluoren-9-yl)methoxy]carbonyl moieties at its amino residues. As disclosed in PCT publication no. WO2020/095183, the disclosure of which is incorporated herein by reference, the releasable PEG comprised can be based upon a 2,7,9-substituted fluorene, with poly(ethylene glycol) chains extending from the 2- and 7-positions on the fluorene ring via amide linkages (fluorene-C(O)—NH˜), and having releasable covalent attachment to IL-2 via attachment to a carbamate nitrogen atom attached via a methylene group (—CH2-) to the 9-position of the fluorene ring. The modified IL-2 can comprise compounds encompassed by the following formula:

[chemical structure]

[0451] wherein each “n”, the number of CH₂CH₂O units) is an integer from about 3 to about 4000, or more preferably is an integer from about 200-300. “m”, referring to the number of polyethylene glycol moieties attached to IL-2 is an integer selected from the group consisting of 1, 2, 3, 7 and more than 7. In some embodiments, each “n” is approximately the same, i.e., the weight average molecular weight of each polyethylene glycol “arm” covalently attached to the fluorenyl core is about the same. Optionally, the weight average molecular weight of each PEG arm is about 10,000 daltons, such that the weight average molecular weight of the overall branched polymer moiety is about 20,000 daltons.

[0452] In another embodiment where the cytokine-binding ABD is a CD122-binding ABD, the ABD can be or comprise a suitable interleukin-15 (IL-15) polypeptide such that the CD122 ABD binds CD122. In some embodiments, the cytokine molecule is an IL-15 molecule, e.g., a full length, a fragment or a variant (IL-15v) of IL-15, e.g., human IL-15. In some embodiments, the IL-15 molecule comprises a wild-type human IL-15 amino acid sequence, e.g., having the amino acid sequence of SEQ ID NO: 418. In some embodiments, the IL-15 molecule comprises an amino sequence at least 70%, 80%, 90%, 95%, 98% or 99% identical to a mature wild-type human IL-15 amino acid sequence of SEQ ID NO: 418. In other embodiments, the IL-15 molecule is a variant of human IL-15, e.g., having one or more amino acid modifications. Optionally the IL-15 comprises a fragment of a human IL-15 polypeptide, wherein the fragment has an amino sequence is identical to or at least 70%, 80%, 90%, 95%, 98% or 99% identical to a contiguous sequence of 40, 50, 60, 70 or 80 amino acids of the wild-type mature human IL-15 polypeptide of SEQ ID NO: 418.

### Wild-Type Mature Human IL-15:

(SEQ ID NO: 418)
NW VNVISDLKKI EDLIQSMHID ATLYTESDVH PSCKVTAMKC
FLLELQVISL ESGDASIHDT VENLIILANN SLSSNGNVTE
SGCKECEELE EKNIKEFLQS FVHIVQMFIN TS

[0454] In some embodiments, an IL-15 variant comprises a modification (e.g. substitution) at position 45, 51, 52, or 72 (with reference to the sequence of human IL-15, SEQ ID NO: 418), e.g., as described in US 2016/0184399. In some embodiments, the IL-15 variant comprises four, five, or six or more modifications. In some embodiments, the IL-15 variant comprises one or more modification at amino acid position 8, 10, 61, 64, 65, 72, 101, or 108 (with reference to the sequence of human IL-15, SEQ ID NO: 418). In some embodiments the IL-15 variant possesses increased affinity for CD122 as compared with wild-type IL-15. In some embodiments the IL-15 variant possesses decreased affinity for CD122 as compared with wild-type IL-15. In some embodiments, the mutation is chosen from D8N, K10Q, D61N, D61H, E64H, N65H, N72A, N72H, Q101N, Q108N, or Q108H (with reference to the sequence of human IL-15, SEQ ID NO: 418). Any combination of the positions can be mutated. In some embodiments, the IL-15 variant comprises two or more mutations. In some embodiments, the IL-15 variant comprises three or more mutations. In some embodiments, the IL-15 variant comprises four, five, or six or more mutations. In some embodiments the IL-15 variant comprises mutations at positions 61 and 64. In some embodiments the mutations at positions 61 and 64 are D61N or D61H and E64Q or E64H. In some embodiments the IL-15 variant comprises mutations at positions 61 and 108. In some embodiments the mutations at positions 61 and 108 are D61N or D61H and Q108N or Q108H.

[0455] The extracellular domain of IL-15Rα comprises a domain referred to as the sushi domain, which binds IL-15. The general sushi domain, also referred to as complement control protein (CCP) modules or short consensus repeats (SCR), is a protein domain found in several proteins, including multiple members of the complement system. The sushi domain adopts a beta-sandwich fold, which is bounded by the first and fourth cysteine of four highly conserved cysteine residues, comprising a sequence stretch of approximately 60 amino acids (Norman, Barlow, et al. J Mol Biol. 1991; 219(4):717-25). The amino acid residues bounded by the first and fourth cysteines of the sushi domain IL-15Rα comprise a 62 amino acid polypeptide referred to as the minimal domain. Including additional amino acids of IL-15Rα at the N- and C-terminus of the minimal sushi domain, such as inclusion of N-terminal lie and Thr and C-terminal Ile and Arg residues result in a 65 amino acid extended sushi domain.

[0456] The CD122 ABD can further comprise a receptor domain, e.g., a cytokine receptor domain. In one embodiment, the cytokine molecule comprises an IL-15 receptor, or a fragment thereof (e.g., an IL-15 binding domain of an IL-15 receptor alpha).

[0457] In some embodiments, the CD122 ABD binds an IL-15 receptor alpha (IL-15Rα) sushi domain, a first domain linker, and an IL-15 polypeptide, e.g. from N- to C-terminus, a IL-15Rα sushi domain fused to a domain linker, in turn fused to an IL-15 polypeptide. Optionally the IL-15 polypeptide is a variant IL-15 polypeptide, e.g., comprising one or more amino acid substitutions. In other embodiments, the variant IL-15 domain comprises the amino acid sequence of SEQ ID NO: 418 and amino acid substitutions selected from the group consisting of N4D/N65D, D30N/N65D, and D30N/E64Q/N65D.

[0458] A sushi domain as described herein may comprise one or more mutations relative to a wild-type sushi domain. In some embodiments, the IL-15Rα sushi domain comprises the amino acid sequence:

(SEQ ID NO: 419)
ITCPPPMSVEHADIWVKSYSLYSRERYICNSGF
KRKAGTSSLTECVLNKATNVAHWTTPSLKCIR

[0459] An IL-15 polypeptide can be modified by connecting, fusing, binding or associating it with one or more other additional compounds using any of several known techniques, for example by conjugation or binding to chemical compounds, polymer (e.g. PEG), or polypeptides or polypeptide chains that result in a decrease of binding to IL-15Rα. In one example, a wild-type IL-15 polypeptide or fragment thereof can be modified by binding to it a IL-15Rα binding peptide or polypeptide, including but not limited to an anti-IL-15 monoclonal antibody or antibody fragment thereof that binds or interacts with IL-15Rα-binding site of human IL-15, thereby decreasing binding to IL-15Rα.

[0460] In another example, an IL-15 polypeptide or fragment thereof can be modified by binding to it a moiety of interest (e.g. a compound, chemical compounds, polymer, linear or branched PEG polymer), covalently attached to a novel amino acid installed at a selected position. Such a modified IL-15 polypeptide can comprise at least one unnatural amino acid at a position on the polypeptide that reduces binding between the modified IL-15 polypeptide and IL-15Rα but retains significant binding with CD122:CD132 signaling complex to form an CD122:CD132 complex, wherein the reduced binding to IL-15Rα is compared to binding between a wild-type IL-15 polypeptide and IL-15Rα. The unnatural amino acid can be positioned at any one or more of residues N1, W2, V3, N4, 16, S7, D8, K10, K11, E13, D14, L15, Q17, S18, M19, H20, 121, D22, A23, T24, L25, Y26, E28, S29, D30, V31, H32, P33, S34, C35, K36, V37, T38, K41, L44, E46, Q48, V49, S51, L52, E53, S54, G55, D56, A57, S58, H60, D61, T62, V63, E64, N65, 167, 168, L69, N71, N72, S73, L74, S75, S76, N77, G78, N79, V80, T81, E82, S83, G84, C85, K86, E87, C88, E89, E90, L91, E92, E93, K94, N95, 196, K97, E98, L100, Q101, S102, V104, H105, Q108, M109, F110, 1111, N112, T113, and S114 of IL-15. As disclosed in WO2019165453, WO2019/028419 and WO2019/014267, the disclosures of which are incorporated herein by reference, the unnatural amino acid can be incorporated into the modified IL-2 polypeptide by an orthogonal tRNA synthetase/tRNA pair. The unnatural amino acid can for example comprise a lysine analogue, an aromatic side chain, an azido group, an alkyne group, or an aldehyde or ketone group. The modified IL-15 polypeptide can then be covalently attached to a water-soluble polymer, a lipid, a protein, or a peptide through the unnatural amino acid. Examples of suitable polymers include polyethylene glycol (PEG), poly(propylene glycol) (PPG), copolymers of ethylene glycol and propylene glycol, poly(oxyethylated polyol), poly(olefinic alcohol), poly(vinylpyrrolidone), poly(hydroxyalkylmethacrylamide), poly(hydroxyalkylmethacrylate), poly(saccharides), poly(a-hydroxy acid), poly(vinyl alcohol), polyphosphazene, polyoxazolines (POZ), poly(N-acryloylmorpholine), or a combination thereof, or a polysaccharide such as dextran, polysialic acid (PSA), hyaluronic acid (HA), amylose, heparin, heparan sulfate (HS), dextrin, or hydroxyethyl-starch (HES).

[0461] For example, as described in WO2020/163532, the disclosure of which is incorporated herein by reference, an amino acid residue in the IL-15 conjugate is replaced by the structure of Formula (I):

[chemical structure]

[0462] wherein:
[0463] Z is CH2 and Y is

[chemical structure]

[0464] Y is CH2 and Z is

[chemical structure]

[0465] Z is CH2 and Y is

[chemical structure]

[0466] or,
[0467] Y is CH2 and Z is

[chemical structure]

[0468] and wherein, W is a PEG group having an average molecular weight selected from 5 kDa, 10 kDa, 15 kDa, 20 kDa, 25 kDa, 30 kDa, 35 kDa, 40 kDa, 45 kDa, 50 kDa, and 60 kDa; and
[0469] X has the structure:

[chemical structure]

[0470] In one embodiment, an IL-15 comprises a releasable polymer (e.g. a releasable PEG polymer), e.g. the IL-15 is conjugated, linked or bound to a releasable polymer that results in a decrease in IL-15R binding in vivo and/or in vitro. Examples include compounds disclosed in PCT publication no. WO2020/097556, the disclosure of which is incorporated herein by reference. For example, the modified IL-15 can comprise comprising compound having the structure:

[chemical structure]

wherein (n) is an integer from about 150 to about 3,000, (m) is an integer selected from 2, 3, 4, and 5, (n′) is 1, and ˜NH˜ represents an amino group of the IL-15 polypeptide.

[0471] In another embodiment where the cytokine-binding ABD binds an IL-21 receptor (IL-21R)-binding ABD, the ABD can be or comprise a suitable interleukin-21 (IL-21) polypeptide such that the IL-21R ABD binds IL-21R on the surface of NK cells. IL-21R is similar in structure to the IL-2 receptor and the IL-15 receptor, in that each of these cytokine receptors comprises a common gamma chain (γc). In some embodiments, the cytokine molecule is an IL-21 molecule, e.g., a full length, a fragment or a variant of IL-21, e.g., human IL-21. In embodiments, the IL-21 molecule is a wild-type, human IL-21, e.g., having the amino acid sequence of SEQ ID NO: 420. In some embodiments, the IL-15 molecule comprises an amino sequence at least 70%, 80%, 90%, 95%, 98% or 99% identical to a mature wild-type human IL-21 amino acid sequence of SEQ ID NO: 420. In other embodiments, the IL-21 molecule is a variant of human IL-21, e.g., having one or more amino acid modifications. Optionally the IL-21 comprises a fragment of a human IL-21 polypeptide, wherein the fragment has an amino sequence is identical to or at least 70%, 80%, 90%, 95%, 98% or 99% identical to a contiguous sequence of 40, 50, 60, 70 or 80 amino acids of the polypeptide of SEQ ID NOS: 420.

### Wild-Type Mature Human IL-21:

(SEQ ID NO: 420)
HKSSSQ GQDRHMIRMR QLIDIVDQLK NYVNDLVPEF
LPAPEDVETN CEWSAFSCFQ KAQLKSANTG NNERIINVSI
KKLKRKPPST NAGRRQKHRL TCPSCDSYEK KPPKEFLERE
KSLLQKMIHQ HLSSRTHGSE DS

[0473] In some embodiments, the IL-21 variant can comprise an IL-21 polypeptide comprising one or more amino acid mutations designed to reduce its ability to bind to human IL-21R, while retaining substantial ability to bind human IL-21R. For example, the IL-21 can be characterized as binding to human IL-21R with a KD that is greater than or is about 0.04 nM, as determined by SPR.

[0474] Examples of such IL-21 variants are provided in PCT publication no. WO2019028316, the disclosure of which is incorporated herein by reference. In exemplary aspects, the amino acid substitutions are located at two amino acid positions selected from the group consisting of 10, 14, 20, 75, 76, 77, 78 and 81 according to numbering of SEQ ID NO: 420 or at two amino acid positions selected from the group consisting of 5, 9, 15, 70, 71, 72, 73, and 76, according to the amino acid position numbering of SEQ ID NO: 421. In exemplary aspects, the IL-21 variant comprises the amino acid sequence:

(SEQ ID NO: 421)
QGQDX HMXXM XXXXX XVDXL KNXVN
DLVPE FLPAP EDVET NCEWS AFSCF
QKAQL KSANT GNNEX XIXXX XXXLX
XXXXX TNAGR RQKHR LTCPS CDSYE
KKPPK EFLXX FXXLL XXMXX QHXSS
RTHGS EDS,

[0475] wherein X represents any amino acid, and wherein the IL-21 variant amino acid sequence differs from the amino acid sequence of human IL-21 (SEQ ID NO: 420) by at least 1 amino acid.

[0476] In exemplary aspects, the IL-21 variant comprises the sequence of SEQ ID NO: 421, wherein SEQ ID NO: 421 differs from SEQ ID NO: 420 by at least one amino acid at a position designated by X in SEQ ID NO: 421. In exemplary aspects, the IL-21 variant has at least about 30%, at least about 40%, at least about 50%, at least about 60%, at least about 70%, at least about 80%, at least about 85%, at least about 90%, or has greater than about 90% (e.g., about 91%, about 92%, about 93%, about 94%, about 95%, about 96%, about 97%, about 98%, or about 99%) sequence identity to SEQ ID NO: 420.

[0477] In exemplary embodiments, the IL-21 variant comprises an amino acid substitution relative to the wild-type IL-21 amino acid sequence within the N-terminal half of the amino acid sequence, e.g. at a position within positions 10-30 or 13-28 (both inclusive), according to the amino acid position numbering of SEQ ID NO: 420. In other exemplary embodiments, the IL-21 variant comprises an amino acid substitution relative to the wild-type IL-21 amino acid sequence within the C-terminal half of the amino acid sequence, e.g., at a position within positions 105-138 or 114-128 (both inclusive), according to the amino acid position numbering of SEQ ID NO: 420. In other exemplary embodiments, the IL-21 variant comprises an amino acid substitution relative to the wild-type IL-21 amino acid sequence in the middle third of the amino acid sequence, e.g., at a position within positions 60-90 or 70-85 (both inclusive), according to the amino acid position numbering of SEQ ID NO: 420.

[0478] Optionally, the IL-21 variant comprises only one amino acid substitution, relative to the wild-type IL-21 amino acid sequence. Optionally, the amino acid substitution is located at an amino acid position selected from the group consisting of: 10, 13, 14, 16, 17, 18, 19, 20, 21, 24, 28, 70, 71, 73, 74, 75, 76, 77, 78, 80, 81, 82, 83, 84, 85, 114, 115, 117, 118, 121, 122, 124, 125, or 128, according to the amino acid position numbering of SEQ ID NO: 420.

[0479] In another embodiment where the cytokine-binding ABD binds an IL-18 receptor (IL-18Rα)-binding ABD, the ABD can be or comprise a suitable interleukin-18 (IL-18) polypeptide such that the IL-18R ABD binds IL-18Rα on the surface of NK cells. In some embodiments, the cytokine molecule is an IL-18 molecule, e.g., a full length, a fragment or a variant of IL-18, e.g., human IL-18. In embodiments, the IL-18 molecule is a wild-type, human IL-18, e.g., having the amino acid sequence of SEQ ID NO: 422. In some embodiments, the IL-18 molecule comprises an amino sequence at least 70%, 80%, 90%, 95%, 98% or 99% identical to a mature wild-type human IL-18 amino acid sequence of SEQ ID NO: 422. In other embodiments, the IL-18 molecule is a variant of human IL-18, e.g., having one or more amino acid modifications. Optionally the IL-18 comprises a fragment of a human IL-18 polypeptide, wherein the fragment has an amino sequence is identical to or at least 70%, 80%, 90%, 95%, 98% or 99% identical to a contiguous sequence of 40, 50, 60, 70 or 80 amino acids of the polypeptide of SEQ ID NO: 422.

### Wild-Type Mature Human IL-18:

(SEQ ID NO: 422)
YFGKLESKLSVIRNLNDQVLFIDQGNRPLFEDMTDSDCRDNAPRTI
FIISMYKDSQPRGMAVTISVKCEKISTLSCENKIISFKEMNPPDN
IKDTKSDIIFFQRSVPGHDNKMQFESSSYEGYFLACEKERDLEKL
ILKKEDELGDRSIMFTVQNED

[0481] In one embodiment, an IL-18 is modified to decrease its binding affinity for IL-18BP while not substantially decreasing affinity for IL-18Rα. For example, an IL-18 may comprise of a modification such as amino acid substitutions at positions M51, S55, R104 and/or N110 that are not involved in IL-18Rα binding, optionally further in combination with a substitution at K53 and/or M60 (positions are with reference to the wild-type mature IL-18 amino acid sequence). In one embodiment, the IL-18 has a M51S, S55A, R104Q, R104K or R104S and/or N110A substitution. In one embodiment, the IL-18 comprises a K53S or K53A substitution. In one embodiment, the IL-18 comprises a M60S or M60K substitution.

[0482] In another embodiment, the cytokine-binding ABD binds a type I interferon receptor, for example interferon-α receptor (IFN-αR). The ABD can be or comprise a suitable type I interferon, for example an interferon-α (IFN-α) or interferon-β (IFN-β) polypeptide such that the IFN-α ABD binds IFN-αR on the surface of NK cells. The interferon-α receptor is also known as the interferon α/β receptor (IFNAR), a heterodimeric transmembrane receptor that is composed of the two subunits IFNAR1 and IFNAR2. For type I IFNs, the main STAT signaling complex is formed by IFN-stimulated gene factor 3 consisting of STAT1, STAT2, and IFN regulatory factor (IRF)-9. In some embodiments, the cytokine molecule is an IFN-α or IFN-β molecule, e.g., a full length, a fragment or a variant of IFN-α or IFN-β, e.g., human IFN-α or IFN-β, for example a human IFN-α1, IFN-α2, IFN-α4, IFN-α5, IFN-α6, IFN-α7, IFN-α8, IFN-α10, IFN-α12, IFN-α14, IFN-α16 or IFN-α17 polypeptide. In some embodiments, the IFN-α or IFN-β molecule is a wild-type, human IFN-α or IFN-β, e.g., having the amino acid sequence of any of SEQ ID NOS: 423-434. In other embodiments, the IFN-α or IFN-β molecule is a variant of human IFN-α or IFN-β, e.g., having one or more amino acid modifications. In some embodiments, the IFN-α or IFN-β molecule comprises an amino sequence at least 70%, 80%, 90%, 95%, 98% or 99% identical to a mature wild-type human IFN-α or IFN-β amino acid sequence of SEQ ID NOS: 423-434, respectively. In other embodiments, the IFN-α or IFN-β molecule is a variant of human IFN-α or IFN-β, e.g., having one or more amino acid modifications. Optionally the IFN-α or IFN-β comprises a fragment of a human IFN-α or IFN-β polypeptide, wherein the fragment has an amino sequence is identical to or at least 70%, 80%, 90%, 95%, 98% or 99% identical to a contiguous sequence of 40, 50, 60, 70 or 80 amino acids of the polypeptide of SEQ ID NOS: 423-434.

### Wild-Type Human IFN-α Mature Proteins:

IFNα2
(SEQ ID NO: 423)
CDLPQTHSLGSRRTLMLLAQMRRISLESCLKDRHDFGFPQEEFGN
QFQKAETIPVLHEMIQQIENLESTKDSSAAWDETLLDKFYTELY
QQLNDLEACVIQGVGVTETPLMKEDSILAVRKYFQRITLYLKEKK
YSPCAWEVVRAEIMRSFSLSTNLQESLRSKE
IFNα1
(SEQ ID NO: 424)
CDLPETHSLDNRRTLMLLAQMSRISPSSCLMDRHDFGFPQEEFDG
NQFQKAPAISVLHELIQQIENLETTKDSSAAWDEDLLDKFCTEL
YQQLNDLEACVMQEERVGETPLMNADSILAVKKYFRRITLYLTEK
KYSPCAWEVVRAEIMRSLSLSTNLQERLRRKE
IFNα4
(SEQ ID NO: 425)
CDLPQTHSLGNRRALILLAQMGRISHFSCLKDRHDFGFPEEEFDG
HQFQKTQAISVLHEMIQQTENLESTEDSSAAWEQSLLEKFSTELY
QQLNDLEACVIQEVGVEETPLMNEDSILAVRKY FQRITLYLTEK
KYSPCAWEVVRAEIMRSLSESTNLQKRLRRKD
IFNα5
(SEQ ID NO: 426)
CDLPQTHSLSNRRTLMIMAQMGRISPFSCLKDRHDFGFPQEEFDG
NQFQKAQAISVLHEMIQQTENLESTKDSSATWDETLLDKFYTELY
QQLNDLEACMMQEVGVEDTPLMNVDSILTVRKYFQRITLYLTEK
KYSPCAWEVVRAEIMRSFSLSANLQERLRRKE
IFNα6
(SEQ ID NO: 427)
CDLPQTHSLGHRRTMMLLAQMRRISLESCLKDRHDFRFPQEEFDG
NQFQKAEAISVLHEVIQQTENLESTKDSSVAWDERLLDKLYTELY
QQLNDLEACVMQEVWVGGTPLMNEDSILAVRKYFQRITLYLTEK
KYSPCAWEVVRAEIMRSFSSSRNLQERLRRKE
IFNα7
(SEQ ID NO: 428)
CDLPQTHSLRNRRALILLAQMGRISPFSCLKDRHEFRFPEEEFDG
HQFQKTQAISVLHEMIQQTENLESTEDSSAAWEQSLLEKESTEL
YQQLNDLEACVIQEVGVEETPLMNEDFILAVRKYFQRITLYLME
KKYSPCAWEVVRAEIMRSFSFSTNLKKGLRRKD
IFNα8
(SEQ ID NO: 429)
CDLPQTHSLGNRRALILLAQMRRISPFSCLKDRHDFEFPQEEFDD
KQFQKAQAISVLHEMIQQTENLESTKDSSAALDETLLDEFYIE
LDQQLNDLESCVMQEVGVIESPLMYEDSILAVRKYFQRITLYLT
EKKYSSCAWEVVRAEIMRSESLSINLQKRLKSKE
IFNα10
(SEQ ID NO: 430)
CDLPQTHSLGNRRALILLGQMGRISPFSCLKDRHDFRIPQEEFDG
NQFQKAQAISVLHEMIQQTENLESTEDSSAAWEQSLLEKFSTELY
QQLNDLEACVIQEVGVEETPLMNEDSILAVRKYFQRITLYLIERK
YSPCAWEVVRAEIMRSLSFSTNLQKRLRRKD
IFNα14
(SEQ ID NO: 431)
CNLSQTHSLNNRRTLMLMAQMRRISPFSCLKDRHDFE FPQEEFD
GNQFQKAQAISVLHEMMQQTENLESTKNSSAAWDETLLEKFYIEL
FQQMNDLEACVIQEVGVEETPLMNEDSILAVKKY FQRITLYLME
KKYSPCAWEVVRAEIMRSLSFSTNLQKRLRRKD
IFNα16
(SEQ ID NO: 432)
CDLPQTHSLGNRRALILLAQMGRISHFSCLKDRYDFGFPQEVEDG
NQFQKAQAISAFHEMIQQTENLFSTKDSSAAWDETLLDKFYIELF
QQLNDLEACVTQEVGVEEIALMNEDSILAVRKYFQRITLYLMG
KKYSPCAWEVVRAEIMRSESFSTNLQKGLRRKD
IFNα17
(SEQ ID NO: 433)
CDLPQTHSLGNRRALILLAQMGRISPFSCLKDRHDFGLPQEEFDG
NQFQKTQAISVLHEMIQQTENLESTEDSSAAWEQSLLEKFSTELY
QQLNNLEACVIQEVGMEETPLMNEDSILAVRKYFQRITLYLTEKK
YSPCAWEVVRAEIMRSLSFSTNLQKILRRKD

[0484] In certain aspects, the IFN-α or IFN-R variant polypeptide has an amino acid sequence that has at least about 30%, at least about 40%, at least about 50%, at least about 60%, at least about 70%, at least about 80%, at least about 85%, at least about 90%, or has greater than about 90% (e.g., about 91%, about 92%, about 93%, about 94%, about 95%, about 96%, about 97%, about 98%, or about 99%) sequence identity to SEQ ID NOS: 423-434, respectively.

[0485] In some embodiments, the wild type or modified signaling agent is a modified interferon-α having decreased binding affinity for its receptor, particularly IFNAR2. In such embodiments, the modified IFNα1, IFNα2, IFNα4, IFNα5, IFNα6, IFNα7, IFNα8, IFNα10, IFNα12, IFNα14, IFNα16 or IFNα17 agent has reduced affinity for and/or induction of signaling at IFNAR (IFNAR1 and/or IFNAR2 chains).

[0486] With the exception of wild-type IFNα1, wild-type IFNs bind to IFNAR2 at affinities (KD), e.g., as determined by microcal or SPR, between 0.1 nM and 5 nM and to IFNAR1 at an affinity of about 1 μM. IFNα1 binds to IFNAR2 with a KD of about 200 nM. In some embodiments, an IFN is modified so as to have an affinity for IFNAR1 and/or IFNAR2 that is equal or less than that of the NKp46 ABD for NKp46. In some embodiments, an IFN is modified so as to have an affinity for IFNAR1 and/or IFNAR2 that is at least 1-log less than that of the NKp46 ABD for NKp46.

[0487] For example, in the exemplary NKp46 ABDs shown herein, the NKp46 ABD has a KD for NKp46 binding of about 15 nM. An IFN can thus be modified by introduction of a modification that causes a reduction of binding affinity of between 10-fold (1-log) and 1000-fold (3-log) (an increase in KD of between 1-log and 3-log). An IFN can include any of the amino acid substitutions shown in the table below. The table below shows exemplary single amino acid substitutions that decrease binding affinity of IFN-α polypeptides to IFNAR2, with a cut-off of a decrease in affinity (higher KD) of at least 1 log compared to the wild-type counterpart and no more than 3-log compared to the wild-type counterpart. The table shows the relative affinity based on KID values for IFNAR2 of the mutated cytokine compared to the wild-type cytokine.

| | IFNAR2 | | | | | | | | | | |
|---|---|---|---|---|---|---|---|---|---|---|---|
| | relative | | | | | | | | | | |
| IFNα2 | affinity | IFNα6 | IFNα4 | IFNα17 | IFNα10 | IFNα7 | IFNα5 | IFNα14 | IFNα16 | IFNα1 | IFNα8 |
| L15A | 0.1 | M15A | L15A | L15A | L15A | L15A | L15A | L15A | L15A | L15A | L15A |
| L30A | 0.0013 | L30A | L30A | L30A | L30A | L30A | L30A | L30A | L30A | L30A | L30A |
| L30V | 0.023 | L30V | L30V | L30V | L30V | L30V | L30V | L30V | L30V | L30V | L30V |
| R144A | 0.03 | R145A | R145A | R145A | R145A | R145A | R145A | R145A | R145A | R145A | R145A |
| A145M | 0.16 | A146M | A146M | A146M | A146M | A146M | A146M | A146M | A146M | A146M | A146M |
| A145G | 0.03 | A146G | A146G | A146G | A146G | A146G | A146G | A146G | A146G | A146G | A146G |
| M148A | 0.03 | M149A | M149A | M149A | M149A | M149A | M149A | M149A | M149A | M149A | M149A |
| R149A | 0.01 | R150A | R150A | R150A | R150A | R150A | R150A | R150A | R150A | R150A | R150A |
| S152A | 0.1 | S153A | S153A | S153A | S153A | S153A | S153A | S153A | S153A | S153A | S153A |
| L153A | 0.1 | S154A | F154A | F154A | F154A | F154A | L154A | F154A | F154A | L154A | L154A |

[0488] The table below shows exemplary single amino acid substitutions decreasing binding affinity of IFN-α polypeptides to IFNAR1, with an at least 2-fold decrease in affinity. The table shows the relative affinity based on KID values for IFNAR1 of the mutated cytokine compared to the wild-type cytokine.

| | IFNAR1 | | | | | | | | | | |
|---|---|---|---|---|---|---|---|---|---|---|---|
| | relative | | | | | | | | | | |
| IFNα2 | affinity | IFNα | IFNα4 | IFNα17 | IFNα10 | IFNα7 | IFNα5 | IFNα14 | IFNα16 | IFNα1 | IFNα8 |
| F64A | 0.44 | F65A | F65A | F65A | F65A | F65A | F65A | F65A | F65A | F65A | F65A |
| N65A | 0.29 | N66A | N66A | N66A | N66A | N66A | N66A | N66A | N66A | N66A | N66A |
| T69A | 0.4 | T70A | T70A | T70A | T70A | T70A | T70A | T70A | T70A | T70A | T70A |
| S73A | 0.5 | S74A | S74A | S74A | S74A | S74A | S74A | S74A | S74A | S74A | S74A |
| L80A | 0.17 | L81A | L81A | L81A | L81A | L81A | L81A | L81A | L81A | L81A | L81A |
| Y85A | 0.35 | Y86A | Y86A | S86A | S86A | S86A | S86A | Y86A | Y86A | C86A | Y86A |
| Y89A | 0.25 | Y90A | Y90A | Y90A | Y90A | Y90A | Y90A | F90A | F90A | Y90A | D90A |
| N93A | 0.46 | N94A | N94A | N94A | N94A | N94A | N94A | N94A | N94A | N94A | N94A |
| E96A | 0.51 | E97A | E97A | E97A | E97A | E97A | E97A | E97A | E97A | E97A | E97A |
| L117A | 0.45 | L118A | L118A | L118A | L118A | L118A | L118A | L118A | L118A | L118A | L118A |
| R120A | <0.05 | R121A | R121A | R121A | R121A | R121A | R121A | K121A | R121A | K121A | R121A |

[0489] Mutant forms of IFNα2 are also described for example in POT publication nos. WO2008/124086, WO2010/030671, WO2013/059885, WO2013/107791, WO2015/007520 and WO2020/198661, the disclosures of which are incorporated hereby by reference.

[0490] In some embodiments, said IFNα2 mutant (IFNα2a or IFNα2b) is mutated at one or more amino acids at positions 144-154, such as amino acid positions 148, 149 and/or 153. In some embodiments, the IFNα2 mutant comprises one or more mutations selected from L153A, R149A, and M148A, described in WO2013/107791. In some embodiments, the IFNα2 mutants have reduced affinity and/or activity for IFNAR1. In some embodiments, the IFNα2 mutant comprises one or more mutations selected from F64A, N65A, T69A, L80A, Y85A, and Y89A, as described in WO2010/030671. In some embodiments, the IFNα2 mutant comprises one or more mutations selected from K133A, R144A, R149A, and L153A as described in WO2008/124086. In some embodiments, the IFNα2 mutant comprises one or more mutations selected from R120E and R120E/K121E, as described in WO2015/007520 and WO2010/030671. In one embodiment, the mutant human IFNα2 comprises an amino acid sequence having at least 95% identity with SEQ ID NO: 423, wherein the mutant IFNα2 has one or more mutations at positions L15, A19, R22, R23, L26, F27, L30, L30, K31, D32, R33, H34, D35, Q40, H57, E58, Q61, F64, N65, T69, L80, Y85, Y89, D 114, L117, R120, R125, K 133, K 134, R144, A145, M 148, R149, S 152, L153, and N156 with respect to SEQ ID NO: 423. In some embodiments, the human IFNα2 mutant comprises one or more mutations selected from, L15A, A19W, R22A, R23A, L26A, F27A, L30A, L30V, K31A, D32A, R33K, R33A, R33Q, H34A, D35A, Q40A, T106A, T106E, D114R, L117A, R120A, R125A, K134A, R144A, A145G, A145M, M148A, R149A, S152A, L153A, and N156A as disclosed in WO 2013/059885, for example in some embodiments, the human IFNα2 mutant comprises the mutations H57Y, E58N, Q61S, and/or L30A; the mutations H57Y, E58N, Q61S, and/or R33A; the mutations H57Y, E58N, Q61S, and/or M148A; the mutations H57Y, E58N, Q61S, and/or L153A; the mutations N65A, L80A, Y85A, and/or Y89A; or the mutations N65A, L80A, Y85A, Y89A, and/or D114A.

[0491] In embodiments, the wild type or modified signaling agent is a modified interferon-α having decreased binding affinity for its receptor, particularly IFNAR2. In such embodiments, the modified IFNα2 agent has reduced affinity for and/or induction of signaling at IFNAR (IFNAR1 and/or IFNAR2 chains).

[0492] In some embodiments, the IFNα1 interferon is modified to have a mutation at one or more amino acids at positions L15, A19, R23, S25, L30, D32, R33, H34, Q40, C86, D115, L118, K121, R126, E133, K134, K135, R145, A146, M149, R150, S153, L154, and N157 with reference to SEQ ID NO: 424. The mutations can optionally be a hydrophobic mutation and can be, e.g., selected from alanine, valine, leucine, and isoleucine. In some embodiments, the FNα1 interferon is modified to have a one or more mutations selected from L15A, A19W, R23A, S25A, L30A, L30V, D32A, R33K, R33A, R33Q, H34A, Q40A, C86S, C86A, D115R, 118A, K121A, K121 E, R126A, R126E, E133A, K134A, K135A, R145A, R145D, R145E, R145G, R145H, R1451, R145K, R145L, R145N, R145Q, R145S, R145T, R145V, R145Y, A146D, A146E, A146G, A146H, A1461, A146K, A146L, A146M, A146N, A146Q, A146R, A146S, A146T, A146V, A146Y, M149A, M149V, R150A, S153A, L154A, and N157A with reference to SEQ ID NO: 424. In some embodiments, the FNα1 mutant comprises one or more multiple mutations selected from L30A/H58Y/E59N/Q62S, R33A/H58Y/E59N/Q62S, M149A/H58Y/E59N/Q62S, L154A/H58Y/E59N/Q62S, R145A/H58Y/E59N/Q62S, D115A/R121A, L118A/R121A, L118A/R121A/K122A, R121A/K122A, and R121 E/K122E with reference to SEQ ID NO: 424. In some embodiments, the IFN-α1 is a variant that comprises one or more mutations which reduce undesired disulphide pairings wherein the one or more mutations are, e.g., at amino acid positions C1, C29, C86, C99, or C139 with reference to SEQ ID NO: 424. In some embodiments, the mutation at position C86 can be, e.g., C86S or C86A or C86Y.

[0493] In embodiments, the wild type or modified signaling agent is IFN-β. In some embodiments, the IFN-β is human having a sequence as shown below:

(SEQ ID NO: 434)
MSYNLLGFLQRSSNFQCQKLLWQLNGRLEYCLKDRMNFDIPEEIK
QLQQFQKEDAALTIYEMLQNIFAIFRQDSSSTGWNETIVENLLAN
VYHQINHLKTVLEEKLEKEDFTRGKLMSSLHLKRYYGRILHYLKA
KEYSHCAWTIVRVEILRNFYFINRLTGYLRN

[0494] In some embodiments, the human IFN-β is a non-glycosylated form of human IFN-β that has a Met-1 deletion and a Cys-17 to Ser mutation. In various embodiments, the modified IFN-β has one or more mutations that reduce its binding to or its affinity for the IFNAR1 subunit of IFNAR. In one embodiment, the modified IFN-β has reduced affinity and/or activity at IFNAR1. In various embodiments, the modified IFN-β is human IFN-β and has one or more mutations at positions F67, R71, L88, Y92, 195, N96, K123, and R124. In some embodiments, the one or more mutations are substitutions selected from F67G, F67S, R71A, L88G, L88S, Y92G, Y92S, 195A, N96G, K123G, and R124G.

[0495] In some embodiments, the modified IFN-β has one or more mutations that reduce its binding to or its affinity for the IFNAR2 subunit of IFNAR. In one embodiment, the modified IFN-β has reduced affinity and/or activity at IFNAR2. In various embodiments, the modified IFN-β is human IFN-β and has one or more mutations at positions W22, R27, L32, R35, V148, L151, R152, and Y155. In some embodiments, the one or more mutations are substitutions selected from W22G, R27G, L32A, L32G, R35A, R35G, V148G, L151G, R152A, R152G, and Y155G.

[0496] Exemplary IFN-β mutations are described in PCT publication nos. WO2020/198661, WO2000/023114 and US20150011732 the disclosures of which are incorporated hereby by reference.

[0497] In another embodiment where the cytokine-binding ABD binds an IL-7 receptor (IL-7R)-binding ABD, the ABD can be or comprise a suitable interleukin-7 (IL-7) polypeptide such that the IL-7R ABD binds IL-7Rα on the surface of NK cells. In some embodiments, the cytokine molecule is an IL-7 molecule, e.g., a full length, a fragment or a variant of IL-7, e.g., human IL-7. In embodiments, the IL-7 molecule is a wild-type, human IL-7, e.g., having the amino acid sequence of SEQ ID NO: 435. In some embodiments, the IL-7 molecule comprises an amino sequence at least 70%, 80%, 90%, 95%, 98% or 99% identical to a mature wild-type human IL-7 amino acid sequence of SEQ ID NO: 435. In other embodiments, the IL-7 molecule is a variant of human IL-7, e.g., having one or more amino acid modifications. Optionally the IL-7 comprises a fragment of a human IL-7 polypeptide, wherein the fragment has an amino sequence is identical to or at least 70%, 80%, 90%, 95%, 98% or 99% identical to a contiguous sequence of 40, 50, 60, 70 or 80 amino acids of the polypeptide of SEQ ID NO: 435.

### Wild-Type Mature Human IL-7:

(SEQ ID NO: 435)
DCDIEGKDGKQYESVLMVSIDQLLDSMKEIGSNCLNNEFNFFKRH
ICDANKEGMFLFRAARKLRQFLKMNSTGDFDLHLLKVSEGTTILL
NCTGQVKGRKPAALGEAQPTKSLEENKSLKEQKKLNDLCFLKRLL
QEIKTCWNKILMGTKEH.

[0499] Wild-type IL-7 bind to IL-7Rα with an affinity (KD), e.g., as determined by microcal or SPR, of between about 50-100 nM. In some embodiments, an IL-7 is modified so as to have an affinity for IL-7Rα that is equal or less than that of the NKp46 ABD for NKp46. In some embodiments, an IL-7 is modified so as to have an affinity for IL-7Rα that is at least 1-log less than that of the NKp46 ABD for NKp46. In some embodiments, an IL-7 is modified so as to have an affinity for IL-7Rα that is at least 1-log less than that of the NKp46 ABD for NKp46, but no more than 3-log, or optionally 2-log, less than that of the NKp46 ABD for NKp46. For example, in the exemplary NKp46 ABDs shown herein, the NKp46 ABD has a KD for NKp46 binding of about 15 nM. An IL-7 can thus be modified by introduction of a modification such as amino acid substitutions Q22A, D74A and/or K81A (with reference to the wild-type mature IL-7 amino acid sequence) that causes a reduction of affinity between IL-7 and IL-7Rα.

[0500] In another embodiment where the cytokine-binding ABD binds an IL-27 receptor (IL-27R)-binding ABD, the ABD can be or comprise a suitable interleukin-27 (IL-27) polypeptide such that the IL-27R ABD binds IL-27R (WSX-1 and/or gp130) on the surface of NK cells. In some embodiments, the cytokine molecule is an IL-27 molecule, e.g., a full length, a fragment or a variant comprising the P28 and EBI3 subunits, e.g., human single chain or heterodimeric IL-27 comprising the P28 and EBI3 subunits, optionally wherein the EBI3 and p28 subunits of IL-27 are linked by a domain linker (e.g., a flexible polypeptide linker, a linker containing glycine a serine residues, a (G₄S)₂ or (G₄S)₃ linker) into a single-chain format. Single-chain forms of IL-27 can be generated consisting of the p28 subunit linked to the EBI3 subunit by a flexible linker, either through the C-terminus of p28 linked to the N-terminus of EBI3 or vice versa. In embodiments, the IL-27 molecule is a wild-type, human IL-27, e.g., a single chain fusion product or a heterodimer comprising the amino acid sequences of SEQ ID NOS: 436 and 437 or a IL27R-binding fragment of any of the SEQ ID NOS: 436 and 437. In some embodiments, the IL-27 molecule comprises an amino sequence at least 70%, 80%, 90%, 95%, 98% or 99% identical to a mature wild-type human IL-27 p28 subunit amino acid sequence of SEQ ID NO: 436 and/or an amino sequence at least 70%, 80%, 90%, 95%, 98% or 99% identical to a mature wild-type human IL-27 EBI3 subunit amino acid sequence of SEQ ID NO: 437. In other embodiments, the IL-27 molecule is a variant of human IL-27, e.g., having one or more amino acid modifications. Optionally the IL-27 comprises a fragment of a human IL-27 p28 subunit polypeptide, wherein the fragment has an amino sequence that is identical to or at least 70%, 80%, 90%, 95%, 98% or 99% identical to a contiguous sequence of 40, 50, 60, 70 or 80 amino acids of the polypeptide of SEQ ID NO: 436, and/or a fragment of a human IL-27 EBI3 subunit polypeptide, wherein the fragment has an amino sequence that is identical to or at least 70%, 80%, 90%, 95%, 98% or 99% identical to a contiguous sequence of 40, 50, 60, 70 or 80 amino acids of the polypeptide of SEQ ID NO: 437. The p28 subunit can be specified as being linked at its N-terminus to the multispecific protein (or to the NKp46 ABD thereof). The EBI3 subunit can be specified as being linked, at its N-terminus, to the C-terminus of the p28 subunit, optionally via a domain linker, or can be specified as being placed on a separate polypeptide that associates with the p28 subunit.

### Wild-Type Mature Human IL-27 p28 Subunit:

(SEQ ID NO: 436)
FPRPPGRPQLSLQELRREFTVSLHLARKLLSEVRGQAHRFAESHL
PGVNLYLLPLGEQLPDVSLTFQAWRRLSDPERLCFISTTLQPFHA
LLGGLGTQGRWTNMERMQLWAMRLDLRDLQRHLRFQVLAAGENLP
EEEEEEEEEEEEERKGLLPGALGSALQGPAQVSWPQLLSTYRLLH
SLELVLSRAVRELLLLSKAGHSVWPLGFPTLSPQP

### Wild-Type Mature Human IL-27 EBI3 Subunit:

(SEQ ID NO: 437)
RKGPPAALTLPRVQCRASRYPIAVDCSWTLPPAPNSTSPVSFIAT
YRLGMAARGHSWPCLQQTPTSTSCTITDVQLESMAPYVLNVTAVH
PWGSSSSFVPFITEHIIKPDPPEGVRLSPLAERQLQVQWEPPGSW
PFPEIFSLKYWIRYKRQGAARFHRVGPIEATSFILRAVRPRARYY
VQVAAQDLTDYGELSDWSLPATATMSLGK

[0503] In some embodiments, an IL-27 is modified so as to have an affinity for WSX-1 and/or gp130 that is equal or less than that of the NKp46 ABD for NKp46. In some embodiments, an IL-27 is modified so as to have an affinity for WSX-1 and/or gp130 that is at least 1-log less than that of the NKp46 ABD for NKp46. In some embodiments, an IL-27 is modified so as to have an affinity for WSX-1 and/or gp130 that is at least 1-log less than that of the NKp46 ABD for NKp46, but no more than 3-log, or optionally 2-log, less than that of the NKp46 ABD for NKp46.

[0504] In another embodiment where the cytokine-binding ABD binds an IL-12 receptor (IL-12R)-binding ABD, the ABD can be or comprise a suitable interleukin-12 (IL-12) polypeptide such that the IL-12R ABD binds IL-12R (IL-12Rβ1 and/or IL-12Rβ2) on the surface of NK cells. In some embodiments, the cytokine molecule is an IL-12 molecule, e.g., a full length, a fragment or a variant comprising the P35 and P40 subunits, e.g., human single chain or heterodimeric IL-12 comprising the P35 and P40 subunits, optionally wherein the p40 and p35 subunits of IL-12 are linked by a domain linker (e.g., a flexible polypeptide linker, a linker containing glycine a serine residues, a (G₄S)₂ or (G₄S)₃ linker) into a single-chain format. Single-chain forms of IL-12 can be generated consisting of the p35 subunit linked to the p40 subunit by a flexible linker, either through the C-terminus of p35 linked to the N-terminus of p40 or vice versa. In embodiments, the IL-12 molecule is a wild-type, human IL-12, e.g., a single chain fusion product or a heterodimer comprising the amino acid sequences of SEQ ID NOS: 438 and 439 or a IL12R-binding fragment of any of the SEQ ID NOS: 438 or 439. In some embodiments, the IL-12 molecule comprises an amino sequence at least 70%, 80%, 90%, 95%, 98% or 99% identical to a mature wild-type human IL-12 p35 subunit amino acid sequence of SEQ ID NO: 438 and/or an amino sequence at least 70%, 80%, 90%, 95%, 98% or 99% identical to a mature wild-type human IL-12 p40 subunit amino acid sequence of SEQ ID NO: 439. In other embodiments, the IL-12 molecule is a variant of human IL-12, e.g., having one or more amino acid modifications. Optionally the IL-12 comprises a fragment of a human IL-12 p35 subunit polypeptide, wherein the fragment has an amino sequence that is identical to or at least 70%, 80%, 90%, 95%, 98% or 99% identical to a contiguous sequence of 40, 50, 60, 70 or 80 amino acids of the polypeptide of SEQ ID NO: 438, and/or a fragment of a human IL-12 p40 subunit polypeptide, wherein the fragment has an amino sequence that is identical to or at least 70%, 80%, 90%, 95%, 98% or 99% identical to a contiguous sequence of 40, 50, 60, 70 or 80 amino acids of the polypeptide of SEQ ID NO: 439. The p35 (alpha) and P40 (beta) can be specified as being linked by a disulphide bridge between Cys74 of the P35 subunit and the Cys177 of the P40 subunit. The p35 subunit can be specified as being linked at its N-terminus to the multispecific protein (or to the NKp46 ABD thereof). The p40 subunit can be specified as being linked, at its N-terminus, to the C-terminus of the p35 subunit, optionally via a domain linker, or can be specified as being placed on a separate polypeptide that associates with the p35 subunit.

Wild-type mature human IL-12 p35 subunit:

(SEQ ID NO: 438)
RNLPVATPDPGMFPCLHHSQNLLRAVSNMLQKARQTLEFYPCTSE
EIDHEDITKDKTSTVEACLPLELTKNESCLNSRETSFITNGSCLA
SRKTSEMMALCLSSIYEDLKMYQVEFKTMNAKLLMDPKRQIFLDQ
NMLAVIDELMQALNENSETVPQKSSLEEPDFYKTKIKLCILLHAF
RIRAVTIDRVMSYLNAS

Wild-type mature human IL-12 p40 subunit:

(SEQ ID NO: 439)
IWELKKDVYVVELDWYPDAPGEMVVLTCDTPEEDGITWTLDQSS
EVLGSGKTLTIQVKEFGDAGQYTCHKGGEVLSHSLLLLHKKEDG
IWSTDILKDQKEPKNKTFLRCEAKNYSGRFTCWWLTTISTDLTF
SVKSSRGSSDPQGVTCGAATLSAERVRGDNKEYEYSVECQEDSAC
PAAEESLPIEVMVDAVHKLKYENYTSSFFIRDIIKPDPPKNLQLK
PLKNSRQVEVSWEYPDTWSTPHSYFSLTFCVQVQGKSKREKKDRV
FTDKTSATVICRKNASISVRAQDRYYSSSWSEWASVPCS

[0505] Wild-type IL-12 dimer binds to IL-12Rβ1 and IL-12Rβ2 with an affinity (KD), e.g., as determined by microcal or SPR, of about 5-7 nM and 5 nM, respectively, and IL-12 dimer binds to IL12Rβ1:IL-12Rβ2 dimers with a KD of about 50 μM. In some embodiments, an IL-12 is modified so as to have an affinity for IL-12Rβ1 and/or IL-12Rβ2 that is equal or less than that of the NKp46 ABD for NKp46. In some embodiments, an IL-12 is modified so as to have an affinity for IL-12Rβ1 and/or IL-12Rβ2 that is at least 1-log less than that of the NKp46 ABD for NKp46. In some embodiments, an IL-12 is modified so as to have an affinity for IL-12Rβ1 and/or IL-12Rβ2 that is at least 1-log lower (1-log higher KD) than that of the NKp46 ABD for NKp46, but no more than 3-log, or optionally 2-log, lower than that of the NKp46 ABD for NKp46.

[0506] NKp46 Variable Region and CDR Sequences

[0507] In some embodiments, the multispecific protein or NKp46 ABD thereof (or the anti-NKp46 antibody from which the ABD is derived) binds the D1 domain of NKp46, the D2 domain of NKp46, or bind a region spanning the D1 and D2 domains (at the border of the D1 and D2 domains, the D1/D2 junction), of the NKp46 polypeptide of SEQ ID NO: 1. In some embodiments, the multispecific protein comprises VH/VL pair from an anti-NKp46 antibody having an affinity for human NKp46, as a full-length IgG antibody, characterized by a K_{D} of less than 10⁻⁸ M, less than 10⁻⁹ M, or less than 10⁻¹⁰ M. In some embodiments, the multispecific protein (or the NKp46-binding ABD thereof) has an affinity (KD) for human NKp46 of between 1 and 100 nM, optionally between 1 and 50 nM, optionally between 1 and 20 nM, optionally about 10 or 15 nM, as determined by SPR.

[0508] In one embodiment, the multispecific protein (or a NKp46-binding ABD or VH/VL pair thereof, for example as when configured in the multispecific protein or as a conventional full-length antibody) binds NKp46 at substantially the same region, site or epitope on NKp46 as antibody NKp46-1, NKp46-2, NKp46-3, NKp46-4, NKp46-6 or NKp46-9. In another embodiment, the antibodies at least partially overlaps, or includes at least one residue in the segment or epitope bound by NKp46-1, NKp46-2, NKp46-3, NKp46-4, NKp46-6 or NKp46-9.

[0509] In one embodiment, all key residues of the epitope are in a segment corresponding to domain D1 or D2. In one embodiment, the antibody or multispecific protein binds a residue present in the D1 domain as well as a residue present in in the D2 domain. In one embodiment, the antibodies bind an epitope comprising 1, 2, 3, 4, 5, 6, 7 or more residues in the segment corresponding to domain D1 or D2 of the NKp46 polypeptide of SEQ ID NO: 1. In one embodiment, the antibodies bind domain D1 and further bind an epitope comprising 1, 2, 3, or 4 of the residues R101, V102, E104 and/or L105.

[0510] In another embodiment, the antibodies or multispecific proteins bind NKp46 at the D1/D2 domain junction and bind an epitope comprising or consisting of 1, 2, 3, 4 or 5 of the residues K41, E42, E119, Y121 and/or Y194.

[0511] In another embodiment, the antibodies or multispecific proteins bind domain D2 and bind an epitope comprising 1, 2, 3, or 4 of the residues P132, E133, 1135, and/or S136.

[0512] The Examples section provided describes a series of mutant human NKp46 polypeptides. In the examples, the binding of multispecific protein to cells transfected with the NKp46 mutants was measured and compared to the ability of anti-NKp46 antibody to bind wild-type NKp46 polypeptide (SEQ ID NO:1). A reduction in binding between an anti-NKp46 antibody or NKp46 binding multispecific protein and a mutant NKp46 polypeptide as described herein means that there is a reduction in binding affinity (e.g., as measured by known methods such FACS testing of cells expressing a particular mutant, or by Biacore testing of binding to mutant polypeptides) and/or a reduction in the total binding capacity of the anti-NKp46 antibody (e.g., as evidenced by a decrease in Bmax in a plot of anti-NKp46 antibody concentration versus polypeptide concentration). A significant reduction in binding indicates that the mutated residue is directly involved in the binding to the anti-NKp46 antibody to NKp46 or is in close proximity to the binding protein when the anti-NKp46 antibody or NKp46 binding multispecific protein is bound to NKp46. An antibody epitope will thus preferably include such residue and may include additional residues adjacent to such residue.

[0513] In some embodiments, a significant reduction in binding means that the binding affinity and/or capacity between an NKp46 ABD or NKp46 binding multispecific protein and a mutant NKp46 polypeptide is reduced by greater than 40%, greater than 50%, greater than 55%, greater than 60%, greater than 65%, greater than 70%, greater than 75%, greater than 80%, greater than 85%, greater than 90% or greater than 95% relative to binding between the antibody and a wild type NKp46 polypeptide (e.g., the polypeptide shown in SEQ ID NO:1). In certain embodiments, binding is reduced below detectable limits. In some embodiments, a significant reduction in binding is evidenced when binding of an anti-NKp46 antibody to a mutant NKp46 polypeptide is less than 50% (e.g., less than 45%, 40%, 35%, 30%, 25%, 20%, 15% or 10%) of the binding observed between the anti-NKp46 antibody and a wild-type NKp46 polypeptide (e.g., the polypeptide shown in SEQ ID NO: 1 (or the extracellular domain thereof)). Such binding measurements can be made using a variety of binding assays known in the art. A specific example of one such assay is described in the Example section.

[0514] In some embodiments, NKp46 binding multispecific proteins exhibit significantly lower binding for a mutant NKp46 polypeptide in which a residue in a wild-type NKp46 polypeptide (e.g., SEQ ID NO:1) is substituted. In the shorthand notation used here, the format is: Wild type residue: Position in polypeptide: Mutant residue, with the numbering of the residues as indicated in SEQ ID NO: 1.

[0515] In some embodiments, an NKp46 binding multispecific binds a wild-type NKp46 polypeptide but has decreased binding to a mutant NKp46 polypeptide having a mutation (e.g., an alanine substitution) any one or more of the residues R101, V102, E104 and/or L105 (with reference to SEQ ID NO:1) compared to binding to the wild-type NKp46).

[0516] In some embodiments, a NKp46-binding multispecific protein binds a wild-type NKp46 polypeptide but has decreased binding to a mutant NKp46 polypeptide having a mutation (e.g., an alanine substitution) at one or more of residues K41, E42, E119, Y121 and/or Y194 (with reference to SEQ ID NO:1) compared to binding to the wild-type NKp46).

[0517] In some embodiments, a NKp46-binding multispecific protein binds a wild-type NKp46 polypeptide but has decreased binding to a mutant NKp46 polypeptide having a mutation (e.g., an alanine substitution) at one or more of residues P132, E133, 1135, and/or S136 (with reference to SEQ ID NO:1) compared to binding to the wild-type NKp46).

[0518] The amino acid sequence of the heavy chain variable region of antibodies NKp46-1, NKp46-2, NKp46-3, NKp46-4, NKp46-6 and NKp46-9 are listed herein in Table B (SEQ ID NOS: 3, 5, 7, 9, 11 and 13 respectively), the amino acid sequence of the light chain variable region of antibodies NKp46-1, NKp46-2, NKp46-3, NKp46-4, NKp46-6 and NKp46-9 are also listed herein in Table B (SEQ ID NOS: 4, 6, 8, 10, 12 and 14 respectively).

[0519] A NKp46-binding multispecific protein that binds essentially the same epitope or determinant as monoclonal antibody NKp46-1, NKp46-2, NKp46-3, NKp46-4, NKp46-6 or NKp46-9; optionally the antibody comprises a hypervariable region of antibody NKp46-1, NKp46-2, NKp46-3, NKp46-4, NKp46-6 or NKp46-9. In any of the embodiments herein, antibody NKp46-1, NKp46-2, NKp46-3, NKp46-4, NKp46-6 or NKp46-9 can be characterized by its amino acid sequence and/or nucleic acid sequence encoding it. In one embodiment, the antibody comprises the Fab or F(ab′)₂ portion of NKp46-1, NKp46-2, NKp46-3, NKp46-4, NKp46-6 or NKp46-9. Also provided is an antibody that comprises the heavy chain variable region of NKp46-1, NKp46-2, NKp46-3, NKp46-4, NKp46-6 or NKp46-9. According to one embodiment, an antibody comprises the three CDRs of the heavy chain variable region of NKp46-1, NKp46-2, NKp46-3, NKp46-4, NKp46-6 or NKp46-9. Also provided is a polypeptide that further comprises one, two or three of the CDRs of the light chain variable region of NKp46-1, NKp46-2, NKp46-3, NKp46-4, NKp46-6 or NKp46-9. Optionally any one or more of said light or heavy chain CDRs may contain one, two, three, four or five or more amino acid modifications (e.g. substitutions, insertions or deletions).

[0520] A multispecific protein or NKp46-binding ABD can for example comprise:
[0521] (a) the heavy chain variable region of NKp46-1, NKp46-2, NKp46-3, NKp46-4, NKp46-6 or NKp46-9 as set forth in Table B, optionally wherein one, two, three or more amino acids may be substituted by a different amino acid;
[0522] (b) the light chain variable region NKp46-1, NKp46-2, NKp46-3, NKp46-4, NKp46-6 or NKp46-9 as set forth in Table B, optionally wherein one, two, three or more amino acids may be substituted by a different amino acid;
[0523] (c) the heavy chain variable region of NKp46-1, NKp46-2, NKp46-3, NKp46-4, NKp46-6 or NKp46-9 as set forth in Table B, optionally wherein one or more of these amino acids may be substituted by a different amino acid; and the respective light chain variable region of NKp46-1, NKp46-2, NKp46-3, NKp46-4, NKp46-6 or NKp46-9 as set forth in Table B, optionally wherein one, two, three or more amino acids may be substituted by a different amino acid;
[0524] (d) the heavy chain CDR 1, 2 and 3 (HCDR1, HCDR2) amino acid sequence of NKp46-1, NKp46-2, NKp46-3, NKp46-4, NKp46-6 or NKp46-9 as shown in Table A, optionally wherein one, two, three or more amino acids in a CDR may be substituted by a different amino acid;
[0525] (e) the light chain CDR 1, 2 and 3 (LCDR1, LCDR2, LCDR3) amino acid sequence of NKp46-1, NKp46-2, NKp46-3, NKp46-4, NKp46-6 or NKp46-9 as shown in Table A, optionally wherein one, two, three or more amino acids in a CDR may be substituted by a different amino acid; or
[0526] (f) the heavy chain CDR 1, 2 and 3 (HCDR1, HCDR2, HCDR3) amino acid sequence of NKp46-1, NKp46-2, NKp46-3, NKp46-4, NKp46-6 or NKp46-9 as shown in Table A, optionally wherein one, two, three or more amino acids in a CDR may be substituted by a different amino acid; and the light chain CDRs 1, 2 and 3 (LCDR1, LCDR2, LCDR3) amino acid sequence of the respective NKp46-1, NKp46-2, NKp46-3, NKp46-4, NKp46-6 or NKp46-9 antibody as shown in Table A, optionally wherein one, two, three or more amino acids in a CDR may be substituted by a different amino acid.

[0527] In one embodiment, the aforementioned CDRs are according to Kabat, e.g. as shown in Table A. In one embodiment, the aforementioned CDRs are according to Chothia numbering, e.g. as shown in Table A. In one embodiment, the aforementioned CDRs are according to IMGT numbering, e.g. as shown in Table A.

[0528] In another aspect of any of the embodiments herein, any of the CHR2, CDR2 and CDR3 of the heavy and light chains may be characterized by a sequence of at least 4, 5, 6, 7, 8, 9 or 10 contiguous amino acids thereof, and/or as having an amino acid sequence that shares at least 50%, 60%, 70%, 80%, 85%, 90% or 95% sequence identity with the particular CDR or set of CDRs listed in the corresponding SEQ ID NO or Table A.

[0529] In another aspect, a multispecific protein competes for binding to an epitope on NKp46 with a monoclonal antibody according to (a) to (f), above.

[0530] The sequences of the CDRs, according to IMGT, Kabat and Chothia definitions systems, are summarized in Table A below. The sequences of the variable chains of the antibodies according to the invention are listed in Table B below. In any embodiment herein, a V_{L} or V_{H} sequence can be specified or numbered so as to contain or lack a signal peptide or any part thereof.

TABLE A

| | CDR | HCDR1 | | HCDR2 | | HCDR3 | |
|---|---|---|---|---|---|---|---|
| | defini- | SEQ | | SEQ | | SEQ | |
| mAb | tion | ID | Sequence | ID | Sequence | ID | Sequence |
| NKp46-1 | Kabat | 15 | DYVIN | 18 | EIYPGSGTNYYNEKFKA | 21 | RGRYGLYAMDY |
| | Chothia | 16 | GYTFTDY | 19 | PGSG | 22 | GRYGLYAMD |
| | IMGT | 17 | GYTFTDYV | 20 | GYTFTDYVIYPGSGTN | 23 | ARRGRYGLYAMDY |
| NKp46-2 | Kabat | 31 | SDYAWN | 34 | YITYSGSTSYNPSLES | 36 | GGYYGSSWGVFAY |
| | Chothia | 32 | GYSITSDY | | YSG | 37 | GYYGSSWGVFA |
| | IMGT | 33 | GYSITSDYA | 35 | ITYSGST | 38 | ARGGYYGSSWGVFAY |
| NKp46-3 | Kabat | 46 | EYTMH | 49 | GISPNIGGTSYNQKFKG | 51 | RGGSFDY |
| | Chothia | 47 | GYTFTEY | | PNIG | 52 | GGSFD |
| | IMGT | 48 | GYTFTEYT | 50 | ISPNIGGT | 53 | ARRGGSFDY |
| NKp46-4 | Kabat | 60 | SFTMH | 63 | YINPSSGYTEYNQKFKD | 65 | GSSRGFDY |
| | Chothia | 61 | GYTFTSF | | PSSG | 66 | SSRGED |
| | IMGT | 62 | GYTFTSFT | 64 | INPSSGYT | 67 | VRGSSRGFDY |
| NKp46-6 | Kabat | 73 | SSWMH | 76 | HIHPNSGISNYNEKFKG | 78 | GGRFDD |
| | Chothia | 74 | GYTFTSS | | PNSG | | GRED |
| | IMGT | 75 | GYTFTSSW | 77 | IHPNSGIS | 79 | ARGGREDD |
| NKp46-9 | Kabat | 85 | SDYAWN | 88 | YITYSGSTNYNPSLKS | 89 | CWDYALYAMDC |
| | Chothia | 86 | GYSITSDY | | YSG | 90 | WDYALYAMD |
| | IMGT | 87 | GYSITSDYA | 35 | ITYSGST | 91 | ARCWDYALYAMDC |
| Bab281 | Kabat | 97 | NYGMN | 100 | WINTNTGEPTYAEEFKG | 102 | DYLYYFDY |
| | Chothia | 98 | GYTFTNY | | TNTG | 103 | YLYYFD |
| | IMGT | 99 | GYTFTNYG | 101 | INTNTGEP | 104 | ARDYLYYFDY |
| | CDR | LCDR1 | | LCDR2 | | LCDR3 | |
| | defini- | SEQ | | SEQ | | SEQ | |
| mAb | tion | ID | Sequence | ID | Sequence | ID | Sequence |
| NKp46-1 | Kabat | 24 | RASQDISNYLN | 27 | YTSRLHS | 28 | QQGNTRPWT |
| | Chothia | 25 | SQDISNY | | YTS | 29 | YTSGNTRPW |
| | IMGT | 26 | QDISNY | | YTS | 30 | YTSQQGNTRPWT |
| NKp46-2 | Kabat | 39 | RVSENIYSYLA | 42 | NAKTLAE | 43 | QHHYGTPWT |
| | Chothia | 40 | SENIYSY | | NAK | 44 | HYGTPW |
| | IMGT | 41 | ENIYSY | | NAK | 45 | QHHYGTPWT |
| NKp46-3 | Kabat | 54 | RASQSISDYLH | 57 | YASQSIS | 58 | QNGHSFPLT |
| | Chothia | 55 | SQSISDY | | YAS | 59 | GHSFPL |
| | IMGT | 56 | QSISDY | | YAS | | QNGHSFPLT |
| NKp46-4 | Kabat | 68 | RASENIYSNLA | 70 | AATNLAD | 71 | QHFWGTPRT |
| | Chothia | | SENIYSN | | AAT | 72 | FWGTPR |
| | IMGT | 69 | ENIYSN | | AAT | | QHFWGTPRT |
| NKp46-6 | Kabat | 80 | RASQDIGSSLN | 81 | ATSSLDS | 82 | LQYASSPWT |
| | Chothia | | SQDIGSS | | ATS | 83 | YASSPWT |
| | IMGT | | QDIGSS | | ATS | 84 | LQYASSPWT |
| NKp46-9 | Kabat | 92 | RTSENIYSYLA | 93 | NAKTLAE | 94 | QHHYDTPLT |
| | Chothia | | SENIYSY | | NAK | 95 | NAKHYDTPL |
| | IMGT | | ENIYSY | | NAK | 96 | QHHYDTPLT |
| Bab281 | Kabat | 105 | KASENVVTYVS | 108 | GASNRYT | 109 | GQGYSYPYT |
| | Chothia | 106 | SENVVTY | | GAS | 110 | GYSYPY |
| | IMGT | 107 | ENVVTY | | GAS | 111 | GQGYSYPYT |

TABLE B

| | SEQ ID | |
|---|---|---|
| Antibody | NO | Amino acid sequence |
| NKp46-1 VH | 3 | QVQLQQSGPELVKPGASVKMSCKASGYTFTDYVINWGKQRSGQGLEWIGEI |
| | | YPGSGTNYYNEKFKAKATLTADKSSNIAYMQLSSLTSEDSAVYFCARRGRY |
| | | GLYAMDYWGQGTSVTVSS |
| NKp46-1 VL | 4 | DIQMTQTTSSLSASLGDRVTISCRASQDISNYLNWYQQKPDGTVKLLIYYT |
| | | SRLHSGVPSRFSGSGSGTDYSLTINNLEQEDIATYFCQQGNTRPWTFGGGT |
| | | KLEIK |
| NKp46-2 VH | 5 | EVQLQESGPGLVKPSQSLSLTCTVTGYSITSDYAWNWIRQFPGNKLEWMGY |
| | | ITYSGSTSYNPSLESRISITRDTSTNQFFLQLNSVTTEDTATYYCARGGYY |
| | | GSSWGVFAYWGQGTLVTVSA |
| NKp46-2 VL | 6 | DIQMTQSPASLSASVGETVTITCRVSENIYSYLAWYQQKQGKSPQLLVYNA |
| | | KTLAEGVPSRESGSGSGTQFSLKINSLQPEDFGSYYCQHHYGTPWTFGGGT |
| | | KLEIK |
| NKp46-3 VH | 7 | EVQLQQSGPELVKPGASVKISCKTSGYTFTEYTMHWVKQSHGKSLEWIGGI |
| | | SPNIGGTSYNQKFKGKATLTVDKSSSTAYMELRSLTSEDSAVYYCARRGGS |
| | | FDYWGQGTTLTVSS |
| NKp46-3 VL | 8 | DIVMTQSPATLSVTPGDRVSLSCRASQSISDYLHWYQQKSHESPRLLIKYA |
| | | SQSISGIPSRESGSGSGSDFTLSINSVEPEDVGVYYCQNGHSFPLTFGAGT |
| | | KLELK |
| NKp46-4 VH | 9 | QVQLQQSAVELARPGASVKMSCKASGYTFTSFTMHWVKQRPGQGLEWIGYI |
| | | NPSSGYTEYNQKFKDKTTLTADKSSSTAYMQLDSLTSDDSAVYYCVRGSSR |
| | | GFDYWGQGTLVTVSA |
| NKp46-4 VL | 10 | DIQMIQSPASLSVSVGETVTITCRASENIYSNLAWFQQKQGKSPQLLVYAA |
| | | TNLADGVPSRESGSGSGTQYSLKINSLQSEDFGIYYCQHFWGTPRTFGGGT |
| | | KLEIK |
| NKp46-6 VH | 11 | QVQLQQPGSVLVRPGASVKLSCKASGYTFTSSWMHWAKQRPGQGLEWIGHI |
| | | HPNSGISNYNEKFKGKATLTVDTSSSTAYVDLSSLTSEDSAVYYCARGGRE |
| | | DDWGAGTTVTVSS |
| NKp46-6 VL | 12 | DIQMTQSPSSLSASLGERVSLTCRASQDIGSSLNWLQQEPDGTIKRLIYAT |
| | | SSLDSGVPKRFSGSRSGSDYSLTISSLESEDFVDYYCLQYASSPWTFGGGT |
| | | KLEIK |
| NKp46-9 VH | 13 | DVQLQESGPGLVKPSQSLSLTCTVTGYSITSDYAWNWIRQFPGNKLEWMGY |
| | | ITYSGSTNYNPSLKSRISITRDTSKNQFFLQLNSVTTEDTATYYCARCWDY |
| | | ALYAMDCWGQGTSVTVSS |
| NKp46-9 VL | 14 | DIQMTQSPASLSASVGETVTITCRTSENIYSYLAWCQQKQGKSPQLLVYNA |
| | | KTLAEGVPSRESGSGSGTHESLKINSLQPEDFGIYYCQHHYDTPLTFGAGT |
| | | KLELK |

[0531] VH and VL pairs of an NKp46 ABD can optionally be function-conservative variants of the VH and VL of any of antibodies NKp46-1, NKp46-2, NKp46-3, NKp46-4, NKp46-6 or NKp46-9. “Function-conservative variants” are those in which a given amino acid residue in a protein (e.g. an antibody or antibody fragment) has been changed without altering the overall conformation and function of the protein, including, but not limited to, replacement of an amino acid with one having similar properties (such as, for example, polarity, hydrogen bonding potential, acidic, basic, hydrophobic, aromatic, and the like). Amino acids other than those indicated as conserved may differ in a protein so that the percent protein or amino acid sequence similarity between any two proteins of similar function may vary and may be, for example, from 70% to 99% as determined according to an alignment scheme such as by the Cluster Method, wherein similarity is based on the MEGALIGN algorithm. A “function-conservative variant” also includes a polypeptide which has at least 60% amino acid identity with the antibody capable of specifically binding to a NKp46 polypeptide as defined hereinabove as determined by BLAST or FASTA algorithms, preferably at least 75%, more preferably at least 85%, still preferably at least 90%, and even more preferably at least 95%, and which has the same or substantially similar properties or functions as the antibodies capable of specifically binding to a NKp46 polypeptide as defined hereinabove.

[0532] Exemplary humanized VH and VL domains can comprise all of an antigen binding region of antibody NKp46-1, NKp46-2, NKp46-3, NKp46-4, NKp46-6 or NKp46-9, for example having the amino acids of the SEQ ID NOS shown in Table 5.

[0533] A light chain variable region of a NKp46-1, NKp46-2, NKp46-3, NKp-46-4, NKp46-6 or NKp46-9 antibody may comprise, for the respective antibody: a human light chain FR1 framework region; a LCDR1 region comprising an amino acid sequence as set forth in Table A, or a sequence of at least 4, 5, 6, 7, 8, 9 or 10 contiguous amino acids thereof, wherein one or more of these amino acids may be substituted by a different amino acid; a human light chain FR2 framework region; a LCDR2 region comprising an amino acid sequence as set forth in Table A, or a sequence of at least 4, 5, 6, 7, 8, 9 or 10 contiguous amino acids thereof, wherein one or more of these amino acids may be substituted by a different amino acid; a human light chain FR3 framework region; and a LCDR3 region comprising an amino acid sequence as set forth in Table A, or a sequence of at least 4, 5, 6, 7, 8, 9 or 10 contiguous amino acids thereof, wherein one or more of these amino acids may be deleted or substituted by a different amino acid. Optionally, the variable region further comprises a human light chain FR4 framework region. Humanization of NKp46-1, NKp46-2, NKp46-3, NKp-46-4, and NKp46-9 VH/VL domains is described in PCT publication no. WO2017114694, the disclosure of which is incorporated herein by reference, amino acid sequence shown below.

NKp46-1: “H1” heavy chain variable region
(SEQ ID NO: 112)
QVQLVQSGAEVKKPGSSVKVSCKASGYTFSDYVINWVRQAPGQGL
EWMGEIYPGSGTNYYNEKFKAKATITADKSTSTAYMELSSLRSED
TAVYYCARRGRYGLYAMDYWGQGTTVTVSS
NKp46-1: “H3” heavy chain variable region
(SEQ ID NO: 113)
QVQLVQSGAEVKKPGSSVKVSCKASGYTFTDYVINWGRQAPGQGL
EWIGEIYPGSGTNYYNEKFKAKATITADKSTSTAYMELSSLRSED
TAVYFCARRGRYGLYAMDYWGQGTTVTVSS
NKp46-1: “L1” light chain variable region
(SEQ ID NO: 114)
DIQMTQSPSSLSASVGDRVTITCRASQDISNYLNWYQQKPGKAPK
LLIYYTSRLHSGVPSRFSGSGSGTDFTFTISSLQPEDIATYFCQQ
GNTRPWTFGGGTKVEIK
NKp46-2: “H1” heavy chain variable region
(SEQ ID NO: 115)
QVQLQESGPGLVKPSQTLSLTCTVSGYSISSDYAWNWIRQPPGKG
LEWIGYITYSGSTSYNPSLESRVTISRDTSKNQFSLKLSSVTAAD
TAVYYCARGGYYGSSWGVFAYWGQGTLVTVSS
NKp46-2: “H2” heavy chain variable region
(SEQ ID NO: 116)
QVQLQESGPGLVKPSQTLSLTCTVSGYSISSDYAWNWIRQPPGKG
LEWMGYITYSGSTSYNPSLESRITISRDTSKNQFSLKLSSVTAAD
TAVYYCARGGYYGSSWGVFAYWGQGTLVTVSS
NKp46-2: “H3” heavy chain variable region
(SEQ ID NO: 117)
QVQLQESGPGLVKPSQTLSLTCTVSGYSITSDYAWNWIRQPPGKG
LEWMGYITYSGSTSYNPSLESRITISRDTSKNQFSLKLSSVTAAD
TAVYYCARGGYYGSSWGVFAYWGQGTLVTVSS
NKp46-2: “L1” light chain variable region
(SEQ ID NO: 118)
DIQMTQSPSSLSASVGDRVTITCRVSENIYSYLAWYQQKPGKAPK
LLVYNAKTLAEGVPSRESGSGSGTDFTLTISSLQPEDFATYYCQH
HYGTPWTFGGGTKVEIK
NKp46-3: “H1” heavy chain variable region
(SEQ ID NO: 119)
QVQLVQSGAEVKKPGSSVKVSCKASGYTFSEYTMHWVRQAPGQGL
EWMGGISPNIGGTSYNQKFKGRVTITADKSTSTAYMELSSLRSED
TAVYYCARRGGSFDYWGQGTTVTVSS
NKp46-3: “H3” heavy chain variable region
(SEQ ID NO: 120)
QVQLVQSGAEVKKPGSSVKVSCKASGYTFSEYTMHWVRQAPGQGL
EWIGGISPNIGGTSYNQKFKGRATITADKSTSTAYMELSSLRSED
TAVYYCARRGGSFDYWGQGTTVTVSS
NKp46-3: “H4” heavy chain variable region
(SEQ ID NO: 121)
QVQLVQSGAEVKKPGSSVKVSCKASGYTFSEYTMHWVRQAPGQGL
EWIGGISPNIGGTSYNQKFKGRATLTADKSTSTAYMELSSLRSED
TAVYYCARRGGSFDYWGQGTTVTVSS
NKp46-3: “L1” light chain variable region
(SEQ ID NO: 122)
EIVMTQSPATLSVSPGERATLSCRASQSISDYLHWYQQKPGQAPR
LLIKYASQSISGIPARFSGSGSGTDFTLTISSLEPEDFAVYYCQN
GHSFPLTFGQGTKLEIK
NKp46-4: “H1” heavy chain variable region
(SEQ ID NO: 123)
QVQLVQSGAEVKKPGASVKVSCKASGYTFTSFTMHWVRQAPGQGL
EWIGYINPSSGYTEYNQKFKDRVTITADKSTSTAYMELSSLRSED
TAVYYCVRGSSRGFDYWGQGTLVTVSS
NKp46-4: “H2” heavy chain variable region
(SEQ ID NO: 124)
QVQLVQSGAEVKKPGASVKVSCKASGYTFTSFTMHWVRQAPGQGL
EWIGYINPSSGYTEYNQKFKDRTTITADKSTSTAYMELSSLRSED
TAVYYCVRGSSRGFDYWGQGTLVTVSS
NKp46-4: “H3” heavy chain variable region
(SEQ ID NO: 125)
QVQLVQSGAEVKKPGASVKVSCKASGYTFTSFTMHWVRQAPGQGL
EWIGYINPSSGYTEYNQKFKDRTTLTADKSTSTAYMELSSLRSED
TAVYYCVRGSSRGFDYWGQGTLVTVSS
NKp46-4: “L2” light chain variable region
(SEQ ID NO: 126)
DIQMTQSPSSLSASVGDRVTITCRASENIYSNLAWFQQKPGKAPK
LLVYAATNLADGVPSRESGSGSGTDYTLTISSLQPEDFATYYCQH
FWGTPRTFGGGTKVEIK
NKp46-9: “H1” heavy chain variable region
(SEQ ID NO: 127)
QVQLQESGPGLVKPSQTLSLTCTVSGGSISSDYAWNWIRQPPGKG
LEWIGYITYSGSTNYNPSLKSRVTISRDTSKNQFSLKLSSVTAAD
TAVYYCARCWDYALYAMDCWGQGTTVTVSS
NKp46-9: “H2” heavy chain variable region
(SEQ ID NO: 128)
QVQLQESGPGLVKPSQTLSLTCTVSGYSISSDYAWNWIRQPPGKG
LEWIGYITYSGSTNYNPSLKSRVTISRDTSKNQFSLKLSSVTAAD
TAVYYCARCWDYALYAMDCWGQGTTVTVSS
NKp46-9: “H3” heavy chain variable region
(SEQ ID NO: 129)
QVQLQESGPGLVKPSQTLSLTCTVSGYSISSDYAWNWIRQPPGKG
LEWMGYITYSGSTNYNPSLKSRITISRDTSKNQFSLKLSSVTAAD
TAVYYCARCWDYALYAMDCWGQGTTVTVSS
NKp46-9: “L1” light chain variable region
(SEQ ID NO: 130)
DIQMTQSPSSLSASVGDRVTITCRTSENIYSYLAWCQQKPGKAPK
LLIYNAKTLAEGVPSRESGSGSGTDFTLTISSLQPEDFATYYCQH
HYDTPLTFGQGTKLEIK
NKp46-9: “L2” light chain variable region
(SEQ ID NO: 131)
DIQMTQSPSSLSASVGDRVTITCRTSENIYSYLAWCQQKPGKAPK
LLVYNAKTLAEGVPSRFSGSGSGTDFTLTISSLQPEDFATYYCQH
HYDTPLTFGQGTKLEIK

[0534] Examples of VH and VL combinations include:
[0535] (a) a VH comprising a CDR1, 2 and 3 of SEQ ID NO: 3 and a FR1, 2 and 3 derived from a human IGHV1-69 gene segment, and a VL comprising a CDR1, 2 and 3 of SEQ ID NO: 4 and a FR1, 2 and 3 derived from a human IGKV1-33 gene segment;
[0536] (b) a VH comprising a CDR1, 2 and 3 of SEQ ID NO: 5 and a FR1, 2 and 3 of a human IGHV4-30-4 gene segment, and a VL comprising a CDR1, 2 and 3 of SEQ ID NO: 6 and a FR1, 2 and 3 derived from a human IGKV1-39 gene segment;
[0537] (c) a VH comprising a CDR1, 2 and 3 of SEQ ID NO: 7 and a FR1, 2 and 3 derived from a human IGHV1-69 gene segment, and a VL comprising a CDR1, 2 and 3 of SEQ ID NO: 8 and a FR1, 2 and 3 derived from a human IGKV3-11 and/or IGKV3-15 gene segment;
[0538] (d) a VH comprising a CDR1, 2 and 3 of SEQ ID NO: 9 and a FR1, 2 and 3 derived from a human IGHV1-46 and/or a IGHV1-69 gene segment, and a VL comprising a CDR1, 2 and 3 of SEQ ID NO: 10 and a FR1, 2 and 3 derived from a human IGKV1-NL1 gene segment; or
[0539] (e) a VH comprising a CDR1, 2 and 3 of SEQ ID NO: 13 and a FR1, 2 and 3 derived from a human IGHV4-30-4 gene segment, and a VL comprising a CDR1, 2 and 3 of SEQ ID NO: 14 and a FR1, 2 and 3 derived from a human IGKV1-39 gene segment.

[0540] In another aspect, examples of humanized anti-NKp46 VH and VL combinations include:
[0541] (a) a VH comprising an amino acid sequence at least 70%, 80%, 90%, 95%, 98% or 100% identical to the amino acid sequence of the NKp46-1 H1 or H3 variable domain, and a VL comprising an amino acid sequence at least 70%, 80%, 90%, 95%, 98% or 100% identical to the amino acid sequence of the NKp46-1 L1 variable domain;
[0542] (b) a VH comprising an amino acid sequence at least 70%, 80%, 90%, 95%, 98% or 100% identical to the amino acid sequence of the NKp46-2 H1, H2 or H3 variable domain, and a VL comprising an amino acid sequence at least 70%, 80%, 90%, 95%, 98% or 100% identical to the amino acid sequence of the NKp46-2 L1 variable domain;
[0543] (c) a VH comprising an amino acid sequence at least 70%, 80%, 90%, 95%, 98% or 100% identical to the amino acid sequence of the NKp46-3 H1, H3 or H4 variable domain, and a VL comprising an amino acid sequence at least 70%, 80%, 90%, 95%, 98% or 100% identical to the amino acid sequence of the NKp46-3 L1 variable domain;
[0544] (d) a VH comprising an amino acid sequence at least 70%, 80%, 90%, 95%, 98% or 100% identical to the amino acid sequence of the NKp46-4 H1 variable domain, and a VL comprising an amino acid sequence at least 70%, 80%, 90%, 95%, 98% or 100% identical to the amino acid sequence of the NKp46-4 L2 variable domain;
[0545] (e) a VH comprising an amino acid sequence at least 70%, 80%, 90%, 95%, 98% or 100% identical to the amino acid sequence of the NKp46-9 H2 variable domain, and a VL comprising an amino acid sequence at least 70%, 80%, 90%, 95%, 98% or 100% identical to the amino acid sequence of the NKp46-9 L1 or L2 variable domain; or
[0546] (f) a VH comprising an amino acid sequence at least 70%, 80%, 90%, 95%, 98% or 100% identical to the amino acid sequence of the NKp46-9 H3 variable domain, and a VL comprising an amino acid sequence at least 70%, 80%, 90%, 95%, 98% or 100% identical to the amino acid sequence of the NKp46-9 L1 or L2 variable domain.

TABLE 5

| Antibody | VH (SEQ ID NO) | VL (SEQ ID NO) |
|---|---|---|
| NKp46-1 H1L1 | 112 | 114 |
| NKp46-1 H3L1 | 113 | 114 |
| NKp46-2 H1L1 | 115 | 118 |
| NKp46-2 H2L1 | 116 | 118 |
| NKp46-2 H3L1 | 117 | 118 |
| NKp46-3 H1L1 | 119 | 122 |
| NKp46-3 H3L1 | 120 | 122 |
| NKp46-3 H4L1 | 121 | 122 |
| NKp46-4 H1L2 | 123 | 126 |
| NKp46-4 H2L2 | 124 | 126 |
| NKp46-4 H3L2 | 125 | 126 |
| NKp46-9 H2L1 | 128 | 130 |
| NKp46-9 H2L2 | 128 | 131 |
| NKp46-9 H3L1 | 129 | 130 |
| NKp46-9 H3L2 | 129 | 131 |

[0547] Activity Testing

[0548] A multispecific protein can be assessed for biological activity, e.g., antigen binding, ability to elicit proliferation of NK cells, ability to elicit target cell lysis by NK and/or elicit activation of NK cells, including any specific signaling activities elicited thereby, for example cytokine production or cell surface expression of markers of activation. In one embodiment, provided are methods of assessing the biological activity, e.g., antigen binding, ability to elicit target cell lysis and/or specific signaling activities elicited thereby, of a multispecific protein of the disclosure. It will be appreciated that when the specific contribution or activity of one of the components of the multispecific protein is to be assessed (e.g. an NKp46 binding ABD, antigen-of-interest binding ABD, an Fc domain, cytokine receptor ABD, etc.), the multispecific format can be produced in a suitable format which allows for assessment of the component (e.g. domain) of interest. The present disclosure also provides such methods, for use in testing, assessing, making and/or producing a multispecific protein. For example, where the contribution or activity of a cytokine is assessed, the multispecific protein can be produced as a protein having the cytokine and another protein in which the cytokine is modified to delete it or otherwise modulate its activity (e.g., wherein the two multispecific proteins otherwise have the same or comparable structure), and tested in an assay of interest. For example, where the contribution or activity of an anti-NKp46 ABD is assessed, the multispecific protein can be produced as a protein having the ABD and another protein in which the ABD is absent or is replaced by an ABD that does not bind NKp46 (e.g., an ABD that binds an antigen not present in the assay system), wherein the two multispecific proteins otherwise have the same or comparable structure, and the two multispecific proteins are tested in an assay of interest. In another example, where the contribution or activity of an anti-antigen of interest (e.g. tumor antigen) ABD is assessed, the multispecific protein can be produced as a protein having the ABD and another protein in which the ABD is absent or is replaced by an ABD that does not bind the tumor antigen or anti-antigen of interest (e.g., an ABD that binds an antigen not present in the assay system, an ABD that bind to a different tumor antigen), wherein the two multispecific proteins otherwise have the same or comparable structure, and the two multispecific proteins are tested in an assay of interest.

[0549] In one aspect of any embodiment described herein, the multispecific protein is capable of inducing activation of an NKp46-expressing cell (e.g. an NK cell, a reporter cell) when the protein is incubated in the presence of the NKp46-expressing cell (e.g. purified NK cells) and a target cell (e.g. tumor cell) that expresses the antigen of interest (e.g. tumor antigen).

[0550] In one aspect of any embodiment described herein, the multispecific protein is capable of inducing NKp46 signaling in an NKp46-expressing cell (e.g. an NK cell, a reporter cell) when the protein is incubated in the presence of an NKp46-expressing cell (e.g. purified NK cells) and a target cell that expresses the antigen of interest). In one aspect of any embodiment described herein, the multispecific protein is capable of inducing CD16A signaling in an CD16A and NKp46-expressing cell (e.g. an NK cell, a reporter cell) when the protein is incubated in the presence of a CD16A and NKp46-expressing cell (e.g. purified NK cells) and a target cell that expresses the antigen of interest).

[0551] Optionally, NK cell activation or signaling in characterized by the increased expression of a cell surface marker of activation, e.g. CD107, CD69, Sca-1 or Ly-6A/E, KLRG1, etc.

[0552] In one aspect of any embodiment described herein, the multispecific protein is capable of inducing an increase of CD137 present on the cell surface of an NKp46- and/or a CD16-expressing cell (e.g. an NK cell, a reporter cell) when the protein is incubated in the presence of the NKp46- and/or a CD16-expressing cell (e.g. purified NK cells), optionally in the absence of target cells.

[0553] In one aspect of any embodiment described herein, the multispecific protein is capable of activating or enhancing the proliferation of NK cells by at least 10-fold, at least 50-fold, or at least 100-fold compared to the same multispecific protein lacking the cytokine receptor ABD (e.g. the cytokine, the CD122 ABD). Optionally the multispecific protein displays an EC50 for activation or enhancing the proliferation of NK cells that is at least 10-fold, 50-fold or 100-fold lower than its EC50 for activation or enhancing the proliferation of CD25-expressing T cells.

[0554] In one aspect of any embodiment described herein, the multispecific protein is capable of activating or enhancing the proliferation of NK cells over CD25-expressing T cells, by at least 10-fold, at least 50-fold, or at least 100-fold. Optionally, the CD25 expressing T cells are CD4 T cells, optionally Treg cells, or CD8 T cells.

[0555] Activation or enhancement of proliferation via cytokine receptor in cells (e.g. NK cells, CD4 T cells, CD8 Tcells or Treg cells) by the cytokine receptor ABD-containing protein can be determined by measuring the expression of pSTAT or the cell proliferation markers (e.g. Ki67) in said cells following the treatment with the multispecific protein. Activation or enhancement of proliferation via the IL-2R pathway in cells (e.g. NK cells, CD4 T cells, CD8 Tcells or Treg cells) by the CD122 ABD-containing protein can be determined by measuring the expression of pSTAT5 or the cell proliferation marker Ki67 in said cells following the treatment with the multispecific protein. IL-2 and IL-15 lead to the phosphorylation of the STAT5 protein, which is involved in cell proliferation, survival, differentiation and apoptosis. Phosphorylated STAT5 (pSTAT5) translocates into the nucleus to regulate transcription of the target genes including the CD25. STAT5 is also required for NK cell survival and NK cells are tightly regulated by the JAK-STAT signaling pathway. In one aspect of any embodiment described herein, the multispecific protein is capable of inducing STAT5 signaling in an NKp46-expressing cell (e.g. an NK cell) when the protein is incubated in the presence of an NKp46-expressing cell (e.g. purified NK cells). In one aspect of any embodiment described herein, the multispecific protein is capable of causing an increase of expression of pSTAT5 in NK cells over CD25-expressing T cells, by at least 10-fold, at least 50-fold, or at least 100-fold. Optionally the multispecific protein displays an EC₅₀ for induction of expression of pSTAT5 in NK cells that is at least 10-fold, 50-fold or 100-fold lower than its EC50 for induction of expression of pSTAT5 in CD25-expressing T cells. Similarly, cytokine receptor signal transduction can also be assessed for other cytokine/cytokine receptor pairs, such as IL-15 (STAT5), IL-21 (STAT3), IL-27 (STAT1), IL-12 (STAT4), etc.

[0556] Activity can be measured for example by bringing NKp46-expressing cells (or CD25-expressing cells, depending on the assay) into contact with the multispecific polypeptide, optionally further in presence of target cells (e.g. tumor cells). In some embodiments, activity is measured for example by bringing target cells and NK cells (i.e. NKp46-expressing cells) into contact with one another, in presence of the multispecific polypeptide. The NKp46-expressing cells may be employed either as purified NK cells or NKp46-expressing cells, or as NKp46-expressing cells within a population of peripheral blood mononuclear cell (PBMC). The target cells can be cells expressing the antigen of interest, optionally tumor cells or.

[0557] In one example, the multispecific protein can be assessed for the ability to cause a measurable increase in any property or activity known in the art as associated with NK cell activity, respectively, such as marker of cytotoxicity (CD107) or cytokine production (for example IFN-γ or TNF-α), increases in intracellular free calcium levels, the ability to lyse target cells, for example in a redirected killing assay, etc.

[0558] In the presence of target cells (target cells expressing the antigen of interest) and NK cells that express NKp46, the multispecific protein will be capable of causing an increase in a property or activity associated with NK cell activity (e.g. activation of NK cell cytotoxicity, CD107 expression, IFNγ production, killing of target cells) in vitro. For example, a multispecific protein according to the invention can be selected based on its ability to increase an NK cell activity by more than about 20%, preferably by least about 30%, at least about 40%, at least about 50%, or more compared to that achieved with the same effector: target cell ratio with the same NK cells and target cells that are not brought into contact with the multispecific protein, as measured by an assay that detects NK cell activity, e.g., an assay which detects the expression of an NK activation marker or which detects NK cell cytotoxicity, e.g., an assay that detects CD107 or CD69 expression, IFNγ production, or a classical in vitro chromium release test of cytotoxicity. Examples of protocols for detecting NK cell activation and cytotoxicity assays are described in the Examples herein, as well as for example, in Pessino et al, J. Exp. Med, 1998, 188 (5): 953-960; Sivori et al, Eur J Immunol, 1999. 29:1656-1666; Brando et al, (2005) J. Leukoc. Biol. 78:359-371; El-Sherbiny et al, (2007) Cancer Research 67(18):8444-9; and Nolte-'t Hoen et al, (2007) Blood 109:670-673). In a classical in vitro chromium release test of cytotoxicity, the target cells are labeled with ⁵¹Cr prior to addition of NK cells, and then the killing is estimated as proportional to the release of ⁵¹Cr from the cells to the medium, as a result of killing. Optionally, a multispecific protein according to the invention can be selected for or characterized by its ability to have greater ability to induce NK cell activity towards target cells, i.e., lysis of target cells compared to a conventional human IgG1 antibody that binds to the same antigen of interest, as measured by an assay of NK cell activity (e.g. an assay that detects NK cell-mediated lysis of target cells that express the antigen of interest).

[0559] As shown herein, a multispecific protein, the different ABDs contribute to the overall activity of the multispecific protein that ultimately manifests itself in potent anti-tumor activity in vivo. Testing methods exemplified herein allow the in vitro assessment of the activities of the different individual ABDs of the multispecific protein by making variants of the multispecific protein that lack a particular ABD and/or using cells that lack receptors for the particular ABD.

[0560] For example, a multispecific protein can be characterized by any of:
[0561] ability to cause activation of or enhancement of the proliferation of NK cells that is increased by at least 10-fold, at least 50-fold, or at least 100-fold (e.g. having an EC50 that is at least 10-fold, at least 50-fold, or at least 100-fold lower) compared to the same multispecific protein lacking the cytokine receptor ABD (e.g., determined by measuring the expression of pSTAT or the cell proliferation markers (e.g. Ki67) in said cells following the treatment with the multispecific protein);
[0562] ability to cause an increase in NK cell cytotoxicity toward tumor cells that is increased by at least 10-fold, at least 50-fold, or at least 100-fold (e.g. having an EC50 that is at least 10-fold, at least 50-fold, or at least 100-fold lower) compared to the same multispecific protein lacking a functional NKp46 ABD and/or lacking a CD16A domain (e.g. having an Fc region modified to reduce or abolish CD16A binding), as determined for example in an assay that detects CD107 or CD69 expression, IFNγ production, or a classical in vitro chromium release test of cytotoxicity;
[0563] ability to cause an increase in NK cell cytotoxicity toward tumor cells that is increased by at least 10-fold, at least 50-fold, or at least 100-fold (e.g. having an EC50 that is at least 10-fold, at least 50-fold, or at least 100-fold lower) compared to the same multispecific protein lacking the domain that binds an antigen of interest (e.g. tumor antigen), as determined for example in an assay that detects CD107 or CD69 expression, IFNγ production, or a classical in vitro chromium release test of cytotoxicity; and/or
[0564] ability to cause activation of or enhancement of the proliferation of NK cells that is increased by at least 10-fold, at least 50-fold, or at least 100-fold (e.g. having an EC50 that is at least 10-fold, at least 50-fold, or at least 100-fold lower) compared to the same multispecific protein lacking the NKp46 ABD and/or lacking a CD16A domain (e.g. having an Fc region modified to reduce or abolish CD16A binding), for example as determined by measuring the expression of pSTAT or the cell proliferation markers (e.g. Ki67) in said NK cells following the treatment of PBMC with the multispecific protein);
[0565] ability to cause activation of or enhancement of the proliferation of NK cells that is increased by at least 10-fold, at least 50-fold, or at least 100-fold (e.g. having an EC50 that is at least 10-fold, at least 50-fold, or at least 100-fold lower) compared to activation of or enhancement of the proliferation Treg cells, CD4 T cells and/or CD8 T cells (e.g., determined by measuring the expression of pSTAT or the cell proliferation markers (e.g. Ki67) in said NK, TReg, CD4 T cells and/or CD8 T cells following the treatment of PBMC with the multispecific protein).

[0566] As disclosed in the Examples, the lacking domains in the comparator proteins can be specified as being substitute domains (e.g. VH and VL pairs) that maintain the structure of the multispecific protein but do not bind to any antigen in the test system. As shown herein, a multispecific protein according to the disclosure, when it does not comprise the cytokine receptor ABD (e.g. the CD122 ABD) and when it possesses an Fc domain that does not bind CD16, does not, substantially induce NKp46 signaling (and/or NK activation that results therefrom) of NK cells when the protein is not bound to the antigen of interest on target cells (e.g. in the absence of the antigen of interest and/or target cells). Thus, the monovalent NKp46 binding component of the multispecific protein does not itself cause NKp46 signaling. Accordingly, in the case of multispecific proteins possessing an Fc domain that binds CD16, such multispecific protein can be produced in a configuration where the cytokine receptor ABD (e.g. CD122 ABD) is inactivated (e.g. modified, masked or deleted, thereby eliminating its ability to bind IL-2Rs) and the protein can be assessed for its ability to elicit NKp46 signaling or NKp46-mediated NK cell activation by testing the effect of this multispecific protein on NKp46 expression, by CD16-negative NK cells. The multispecific protein can optionally be characterized as not substantially causing (or increasing) NKp46 signaling by an NKp46-expressing, CD16-negative cell (e.g. a NKp46*CD16⁻ NK cell, a reporter cell) when the multispecific protein is incubated with such NKp46-expressing, CD16-negative cells (e.g., purified NK cells or purified reporter cells) in the absence of target cells.

[0567] In one aspect of any embodiment herein, a multispecific protein can for example be characterized by:
[0568] (a) capable of inducing cytokine receptor (e.g. CD122) signaling (e.g., as determined by assessing STAT signaling, for example assessing STAT phosphoylation) in an NKp46-expressing cell (e.g. an NK cell) when the multispecific protein is incubated in the presence of an NKp46-expressing cell (e.g. purified NK cells);
[0569] (b) being capable of inducing NK cells that express NKp46 (and optionally further CD16) to lyse target cells, when incubated in the presence of the NK cells and target cells; and
[0570] (c) lack of NK cell activation or cytotoxicity and/or lack of agonist activity at NKp46 when incubated with NK cells (optionally CD16-negative NK cells, NKp46-expressing NK cells that do not express CD16), in the absence of target cells, optionally wherein the NK cells are purified NK cells, when the multispecific protein is modified to lack the cytokine receptor ABD (e.g. CD122 ABD) or comprises an inactivated cytokine receptor ABD.

[0571] Assay conditions and methods, including but not limited to cell types and effector: target ratios can optionally be specified to be according to the Examples herein.

### Uses of Compounds

[0572] In one aspect, provided is the use of any of the multispecific proteins, cells which express the proteins (or a polypeptide chain thereof) and/or cells (e.g. NK cells) which have been loaded or incubated with the proteins, for the manufacture of a pharmaceutical preparation for the treatment, prevention or diagnosis of a disease in a mammal (e.g. human) in need thereof. Provided also are the use any of the compounds defined above as a medicament or an active component or active substance in a medicament. In a further aspect the invention provides methods for preparing a pharmaceutical composition containing a compound or composition as defined herein, to provide a solid or a liquid formulation for administration (e.g., by subcutaneous or intravenous injection). Such a method or process can be specified as comprising a step of mixing the compound with a pharmaceutically acceptable carrier.

[0573] In one aspect, provided is a method to treat, prevent or more generally affect a predefined condition in an individual or to detect a certain condition by using or administering a multispecific protein or antibody described herein, or a (pharmaceutical) composition comprising same.

[0574] For example, in one aspect, the invention provides a method of restoring or potentiating the activity and/or proliferation of NKp46-expressing cells, particularly NKp46⁺ NK cells (e.g. NKp46⁺CD16⁺ NK cells, NKp46⁺CD16− NK cells) in a patient in need thereof (e.g. a patient having a cancer, or a viral or bacterial infection), comprising the step of administering a multispecific protein described herein to said patient. In one aspect, the invention provides a method of selectively restoring or potentiating the activity and/or proliferation of NK cells over CD25-expressing lymphocytes, e.g. CD4 T cells, CD8 T cells, Treg cells. In one embodiment, the method is directed at increasing the activity of NKp46⁺ lymphocytes (e.g. NKp46⁺CD16⁺ NK cells, NKp46⁺CD16− NK cells) in patients having a disease in which increased lymphocyte (e.g. NK cell) activity is beneficial or which is caused or characterized by insufficient NK cell activity, such as a cancer, or a viral or microbial/bacterial infection.

[0575] In one aspect, the invention provides a method of restoring or potentiating the activity and/or proliferation of tumor-infiltrating NK cells or intra-tumoral NKp46-expressing cells, particularly NKp46⁺ NK cells (e.g. NKp46⁺CD16⁺ NK cells, NKp46⁺CD16⁻ NK cells) in a patient in need thereof (e.g. a patient having a solid tumor), comprising the step of administering a multispecific protein described herein to said patient.

[0576] In one aspect, the invention provides a method of increasing the number of tumor-infiltrating NK cells or intra-tumoral NKp46-expressing cells, particularly activated NKp46-expressing cells, particularly NKp46⁺ NK cells (e.g. NKp46⁺CD16⁺ NK cells, NKp46⁺CD16⁻ NK cells) in a patient in need thereof (e.g. a patient having a solid tumor), comprising the step of administering a multispecific protein described herein to said patient.

[0577] In another aspect, the invention provides a method of restoring or potentiating the activity and/or proliferation of NKp46⁺ NK cells (e.g. NKp46⁺CD16⁺ NK cells, NKp46⁺CD16⁻ NK cells) in a patient in need thereof (e.g. a patient having a cancer, or a viral, parasite or bacterial infection), comprising the step of contacting cells derived from the patient, e.g., immune cells and optionally target cells expressing an antigen of interest with a multispecific protein according to the invention and reinfusing the multispecific protein treated cells into the patient. In one embodiment, this method is directed at increasing the activity of NKp46⁺ lymphocytes (e.g. NKp46⁺CD16⁺ NK cells) in patients having a disease in which increased lymphocyte (e.g. NK cell) activity is beneficial or which is caused or characterized by insufficient NK cell activity, such as a cancer, or a viral or microbial, e.g., bacterial or parasite infection.

[0578] In another aspect, the invention provides a method of restoring or potentiating the activity and/or proliferation of NKp46⁺ NK cells (e.g. NKp46⁺CD16⁺ NK cells, NKp46⁺CD16⁻ NK cells) in a patient in need thereof (e.g. a patient having a cancer, or a viral, parasite or bacterial infection), comprising the step of contacting cells derived from the patient, e.g., immune cells with a multispecific protein according to the invention and reinfusing the multispecific protein-treated cells into the patient. In one embodiment, this method is directed at increasing the activity of NKp46⁺ lymphocytes (e.g. NKp46⁺CD16⁺ NK cells) in patients having a disease in which increased lymphocyte (e.g. NK cell) activity is beneficial or which is caused or characterized by insufficient NK cell activity, such as a cancer, or a viral or microbial, e.g., bacterial or parasite infection.

[0579] In another embodiment the subject multispecific proteins may be used or administered in combination with immune cells, particularly NK cells, derived from a patient who is to be treated or from a different donor, and these NK cells administered to a patient in need thereof such as a patient having a disease in which increased lymphocyte (e.g. NK cell) activity is beneficial or which is caused or characterized by insufficient NK cell activity, such as a cancer, or a viral or microbial, e.g., bacterial or parasite infection. As NK cells (unlike CAR-T cells) do not express TCRs, these NK cells, even those derived from different donors will not induce a GVHD reaction (see e.g., Glienke et al., “Advantages and applications of CAR-expressing natural killer cells”, Front. Pharmacol. 6, Art. 21:1-6 (2015); Hermanson and Kaufman, Front. Immunol. 6, Art. 195:1-6 (2015)).

[0580] In one embodiment, the multispecific protein disclosed herein that mediates NK cell activation, proliferation, tumor infiltration and/or target cell lysis via multiple activating receptors of effector cells, including NKp46, CD16 and CD122, can be used advantageously for treatment of individuals whose effector cells or tumor-infiltrating effector cells (e.g. NKp46+NK cells) cells are hypoactive, exhausted or suppressed, for example a patient who has a significant population of effector cells characterized by the expression and/or upregulation of one or multiple inhibitory receptors (e.g. TIM-3, PD1, CD96, TIGIT, etc.), or the downregulation or low level of expression of CD16 (e.g., presence of elevated proportion of NKp46⁺CD16⁻ NK cells).

[0581] The multispecific polypeptides or cells described herein can be used to prevent or treat disorders that can be treated with antibodies, such as cancers, solid and non-solid tumors, hematological malignancies, infections such as viral infections, and inflammatory or autoimmune disorders.

[0582] In one embodiment, the antigen of interest (the non-NKp46 antigen) is an antigen expressed on the surface of a malignant cell of a type of cancer selected from the group consisting of: carcinoma, including that of the bladder, head and neck, breast, colon, kidney, liver, lung, ovary, prostate, pancreas, stomach, cervix, thyroid and skin, including squamous cell carcinoma; hematopoietic tumors of lymphoid lineage, including leukemia, acute lymphocytic leukemia, acute lymphoblastic leukemia, B-cell lymphoma, T-cell lymphoma, Hodgkin's lymphoma, non-Hodgkin's lymphoma, hairy cell lymphoma and Burkett's lymphoma; hematopoietic tumors of myeloid lineage, including acute and chronic myelogenous leukemias and promyelocytic leukemia; tumors of mesenchymal origin, including fibrosarcoma and rhabdomyosarcoma; other tumors, including neuroblastoma and glioma; tumors of the central and peripheral nervous system, including astrocytoma, neuroblastoma, glioma, and schwannomas; tumors of mesenchymal origin, including fibrosarcoma, rhabdomyosarcoma, and osteosarcoma; and other tumors, including melanoma, xeroderma pigmentosum, keratoacanthoma, seminoma, thyroid follicular cancer and teratocarcinoma, hematopoietic tumors of lymphoid lineage, for example T-cell and B-cell tumors, including but not limited to T-cell disorders such as T-prolymphocytic leukemia (T-PLL), including of the small cell and cerebriform cell type; large granular lymphocyte leukemia (LGL) preferably of the T-cell type; Sezary syndrome (SS); Adult T-cell leukemia lymphoma (ATLL); a/d T-NHL hepatosplenic lymphoma; peripheral/post-thymic T cell lymphoma (pleomorphic and immunoblastic subtypes); angio immunoblastic T-cell lymphoma; angiocentric (nasal) T-cell lymphoma; anaplastic (Ki 1+) large cell lymphoma; intestinal T-cell lymphoma; T-lymphoblastic; and lymphoma/leukemia (T-Lbly/T-ALL).

[0583] In one embodiment, a multispecific protein is used to prevent or treat a cancer selected from the group consisting of: carcinoma, including that of the bladder, head and neck, breast, colon, kidney, liver, lung, ovary, prostate, pancreas, stomach, cervix, thyroid and skin, including squamous cell carcinoma; hematopoietic tumors of lymphoid lineage, including leukemia, acute lymphocytic leukemia, acute lymphoblastic leukemia, B-cell lymphoma, T-cell lymphoma, Hodgkin's lymphoma, non-Hodgkin's lymphoma, hairy cell lymphoma and Burkett's lymphoma; hematopoietic tumors of myeloid lineage, including acute and chronic myelogenous leukemias and promyelocytic leukemia; tumors of mesenchymal origin, including fibrosarcoma and rhabdomyosarcoma; other tumors, including neuroblastoma and glioma; tumors of the central and peripheral nervous system, including astrocytoma, neuroblastoma, glioma, and schwannomas; tumors of mesenchymal origin, including fibrosarcoma, rhabdomyosarcoma, and osteosarcoma; and other tumors, including melanoma, xeroderma pigmentosum, keratoacanthoma, seminoma, thyroid follicular cancer and teratocarcinoma. Other exemplary disorders that can be treated according to the invention include hematopoietic tumors of lymphoid lineage, for example T-cell and B-cell tumors, including but not limited to T-cell disorders such as T-prolymphocytic leukemia (T-PLL), including of the small cell and cerebriform cell type; large granular lymphocyte leukemia (LGL) preferably of the T-cell type; Sézary syndrome (SS); Adult T-cell leukemia lymphoma (ATLL); a/d T-NHL hepatosplenic lymphoma; peripheral/post-thymic T cell lymphoma (pleomorphic and immunoblastic subtypes); angio immunoblastic T-cell lymphoma; angiocentric (nasal) T-cell lymphoma; anaplastic (Ki 1+) large cell lymphoma; intestinal T-cell lymphoma; T-lymphoblastic; and lymphoma/leukaemia (T-Lbly/T-ALL).

[0584] In one example, the tumor antigen is an antigen expressed on the surface of a lymphoma cell or a leukemia cell, and the multispecific protein is administered to, and/or used for the treatment of, an individual having a lymphoma or a leukemia. Optionally, the tumor antigen is selected from HER2, CD19, CD20, CD22, CD30 or CD33.

[0585] In one embodiment, the inventive multispecific polypeptides or cell compositions described herein can be used to prevent or treat a cancer characterized by tumor cells that express the antigen of interest (e.g. tumor antigen) to which the multispecific protein of the disclosure specifically binds.

[0586] In one aspect, the methods of treatment comprise administering to an individual a multispecific protein described herein in a therapeutically effective amount, e.g., for the treatment of a disease as disclosed herein, for example any of the cancers identified above. A therapeutically effective amount may be any amount that has a therapeutic effect in a patient having a disease or disorder (or promotes, enhances, and/or induces such an effect in at least a substantial proportion of patients with the disease or disorder and substantially similar characteristics as the patient).

[0587] The multispecific protein may be used with our without a prior step of detecting the expression of the antigen of interest (e.g. tumor antigen) on target cells in a biological sample obtained from an individual (e.g. a biological sample comprising cancer cells, cancer tissue or cancer-adjacent tissue). In another embodiment, the disclosure provides a method for the treatment or prevention of a cancer in an individual in need thereof, the method comprising:
[0588] a) detecting cells (e.g. tumor cells) in a sample from the individual that express an antigen of interest (e.g. the antigen of interest to which the multispecific protein specifically binds via its antigen of interest ABD), and
[0589] b) upon a determination that cells which express an antigen of interest are comprised in the sample, optionally at a level corresponding at least to a reference level (e.g. corresponding to an individual deriving substantial benefit from a multispecific protein, or optionally at a level that is increased compared to a reference level (e.g. corresponding to a healthy individual or an individual not deriving substantial benefit from a protein described herein), administering to the individual a multispecific protein of the disclosure that binds to an antigen of interest, to NKp46, to cytokine receptor (e.g. CD122), and optionally to CD16A (e.g., via its Fc domain).

[0590] In some embodiments, the multispecific proteins are used to treat a tumor characterized by low levels of surface expression of the antigen of interest. Accordingly, in, the tumor or cancer can be characterized by cells expressing a low level of tumor antigen. Optionally, the level of the tumor antigen is less than 100,000 tumor antigen copies per cancer cell. In some aspects, the level of the tumor antigen is less than 90,000, less than 75,000, less than 50,000, or less than 40,000 tumor antigen copies per cancer cell. The uses optionally further comprise detecting the level of tumor antigen of one or more cancer cells of the subject.

[0591] The multispecific protein may be used with our without a prior step of detecting or characterizing NK cells from an individual to be treated. Optionally, in one embodiment, the invention provides a method for the treatment or prevention of a cancer in an individual in need thereof, the method comprising:
[0592] a) detecting NK cells (e.g. tumor-infiltrating NK cells) in a tumor sample from an individual (or within the tumor and/or within adjacent tissue), and
[0593] b) upon a determination that the tumor or tumor sample is characterized by a low number or activity of NK cells, optionally at a level or number that is decreased compared to a reference level (e.g. at a level corresponding to an individual deriving no, low or insufficient benefit from a conventional IgG antibody therapy such a conventional IgG1 antibody that binds to the same cancer antigen), administering to the individual a multispecific protein that binds to a cancer antigen, to NKp46 (e.g., monovalently), to cytokine receptor (e.g., CD122) and optionally to CD16A.

[0594] In some embodiments, an individual has a tumor characterized by a CD16 (e.g. CD16A) deficient tumor microenvironment. Optionally, the methods of treatment using a multispecific protein comprise a step of detecting the expression level of CD16 in a sample (e.g. a tumor sample) from the individual. Detecting the CD16 optionally comprises detecting the level of CD16A or CD16B. In some aspects, the CD16 deficient microenvironment is assessed in a patient having undergone a hematopoietic stem cell transplantation. Optionally, the CD16 deficient microenvironment comprises a population of infiltrating NK cells, and the infiltrating NK cells have less than 50% expression of CD16 as compared to a control NK cell. In some aspects, the infiltrating NK cells have less than 30%, less than 20%, or less than 10% expression of CD16 as compared to a control NK cell. Optionally, the CD16 deficient microenvironment comprises a population of infiltrating NK cells, and at least 10% of the infiltrating NK cells have reduced expression of CD16 as compared to a control NK cell. In some aspects, at least 20%, at least 30%, or at least 40% of the infiltrating NK cells have reduced expression of CD16 as compared to a control NK cell.

[0595] Optionally, in one embodiment, provided is a method for the treatment or prevention of a cancer in an individual in need thereof, the method comprising:
[0596] a) detecting CD16 expression in cells (e.g. in tumor-infiltrating NK cells) from a tumor or tumor sample (e.g., tumor and/or within adjacent tissue) from an individual, and
[0597] b) upon a determination that the tumor or tumor sample is characterized by a CD16 deficient microenvironment, administering to the individual a multispecific protein that binds to a cancer antigen, to NKp46, and to the cytokine receptor (e.g. CD122) (and optionally further to CD16A).

[0598] Optionally, in one embodiment, provided is a method for the treatment or prevention of a cancer in an individual in need thereof, the method comprising:
[0599] a) detecting CD16 expression at the surface of NK cells (e.g. tumor-infiltrating NK cells) in a tumor sample from an individual (or within the tumor and/or within adjacent tissue), and
[0600] b) upon a determination that the tumor or tumor sample is characterized by an elevated proportion of CD16⁻ NK cells, optionally at a level or number that is increased compared to a reference level, administering to the individual a multispecific protein that binds to a cancer antigen, to NKp46, and to the cytokine receptor (e.g. CD122) (and optionally further to CD16A).

[0601] In one embodiment, the disclosure provides a method for the treatment or prevention of a disease (e.g. a cancer) in an individual in need thereof, the method comprising:
[0602] a) detecting cell surface expression of one or a plurality inhibitory receptors on immune effector cells (e.g. NK cells, T cells) in a sample from the individual (e.g. in circulation or in the tumor environment), and
[0603] b) upon a determination of cell surface expression of one or a plurality inhibitory receptors on immune effector cells, optionally at a level that is increased compared to a reference level (e.g. at a level that is increased compared to a healthy individual, an individual not suffering from immune exhaustion or suppression, or an individual not deriving substantial benefit from a protein described herein), administering to the individual a multispecific protein (e.g. a multispecific protein) that binds to an antigen of interest (e.g. a cancer antigen), to NKp46 (e.g., monovalently), and to the cytokine receptor (e.g. CD122) (and optionally further to CD16A).

[0604] In some embodiments, the multispecific proteins are used to treat an individual having a gastric cancer or a prostate cancer. Decreased cell surface expression of NKG2D on immune effector cells has been observed in gastric cancer and prostate cancer.

[0605] In some embodiments, an individual has NK cells and/or T cells characterized by decreased expression of NKG2D, e.g. decreased cell surface expression. The level of expression can be for example compared to a reference value, for example a reference value corresponding to NKG2D levels observed on NK and/or T cells in healthy individuals. In some embodiments, an individual has NK and/or T cell characterized by decreased expression of NKG2D on NK and/or T cells in the tumor microenvironment. In some embodiments, an individual has presence (e.g. at increased levels) of soluble ligands of NKG2D in the tumor microenvironment, for example soluble MICA, MICB or ULBP proteins.

[0606] In one embodiment, the disclosure provides a method for the treatment or prevention of a disease (e.g. a cancer) in an individual in need thereof, the method comprising:
[0607] a) detecting cell surface expression of NKG2D polypeptides on immune effector cells (e.g. NK cells, T cells) in a sample from the individual (e.g. in circulation or in the tumor environment), and
[0608] b) upon a determination of decreased cell surface expression of one or a plurality inhibitory receptors on immune effector cells, optionally at a level that is decreased compared to a reference level (e.g. at a level that is increased compared to a healthy individual, an individual not suffering from immune exhaustion or suppression, or an individual not deriving substantial benefit from a protein described herein), administering to the individual a multispecific protein (e.g. a multispecific protein) that binds to an antigen of interest (e.g. a cancer antigen), to NKp46 (e.g., monovalently), and to the cytokine receptor (e.g. CD122) (and optionally further to CD16A).

[0609] In one embodiment, a multispecific protein may be used as a monotherapy (without other therapeutic agents), or in combined treatments with one or more other therapeutic agents that are administered separately. In one embodiment, a multispecific protein is administered in the absence of combined treatment with an IL-2, IL-15, IL-21, IL-7, IL-27, IL-12, IL-18, IFN-α or IFN-β polypeptide.

[0610] The multispecific proteins can also be included in kits. The kits may optionally further contain any number of polypeptides and/or other compounds, e.g., 1, 2, 3, 4, or any other number of multispecific proteins and/or other compounds. It will be appreciated that this description of the contents of the kits is not limiting in any way. For example, the kit may contain other types of therapeutic compounds. Optionally, the kits also include instructions for using the polypeptides, e.g., detailing the herein-described methods such as in the detection or treatment of specific disease conditions.

[0611] Also provided are pharmaceutical compositions comprising the subject multispecific proteins and optionally other compounds as defined above. A multispecific protein and optionally another compound may be administered in purified form together with a pharmaceutical carrier as a pharmaceutical composition. The form depends on the intended mode of administration and therapeutic or diagnostic application. The pharmaceutical carrier can be any compatible, nontoxic substance suitable to deliver the compounds to the patient. Pharmaceutically acceptable carriers are well known in the art and include, for example, aqueous solutions such as (sterile) water or physiologically buffered saline or other solvents or vehicles such as glycols, glycerol, oils such as olive oil or injectable organic esters, alcohol, fats, waxes, and inert solids. A pharmaceutically acceptable carrier may further contain physiologically acceptable compounds that act for example to stabilize or to increase the absorption of the compounds Such physiologically acceptable compounds include, for example, carbohydrates, such as glucose, sucrose or dextrans, antioxidants, such as ascorbic acid or glutathione, chelating agents, low molecular weight proteins or other stabilizers or excipients One skilled in the art would know that the choice of a pharmaceutically acceptable carrier, including a physiologically acceptable compound, depends, for example, on the route of administration of the composition Pharmaceutically acceptable adjuvants, buffering agents, dispersing agents, and the like, may also be incorporated into the pharmaceutical compositions. Non-limiting examples of such adjuvants include by way of example inorganic and organic adjuvants such as alum, aluminum phosphate and aluminum hydroxide, squalene, liposomes, lipopolysaccharides, double stranded (ds) RNAs, single stranded (s-s) DNAs, and TLR agonists such as unmethylated CpG's.

[0612] Multispecific proteins according to the invention can be administered parenterally. Preparations of the compounds for parenteral administration must be sterile. Sterilization is readily accomplished by filtration through sterile filtration membranes, optionally prior to or following lyophilization and reconstitution. The parenteral route for administration of compounds is in accord with known methods, e.g. injection or infusion by intravenous, intraperitoneal, intramuscular, intraarterial, or intralesional routes. The compounds may be administered continuously by infusion or by bolus injection. A typical composition for intravenous infusion could be made up to contain 100 to 500 ml of sterile 0.9% NaCl or 5% glucose optionally supplemented with a 20% albumin solution and 1 mg to 10 g of the compound, depending on the particular type of compound and its required dosing regimen.

[0613] Methods for preparing parenterally administrable compositions are well known in the art.

### EXAMPLES

### Preparation of Multispecific Proteins

[0614] The domain structure of an exemplary “T5” format multispecific protein comprising IL-2 variant as used in the Examples is shown in FIGS. 2A and 2G, incorporating a humanized NK46-1 VH and VL pair as the NKp46 ABD. FIG. 2A shows domain linkers such as hinge and glycine-serine linkers, and interchain disulfide bridges. The domain structure of the exemplary “T6” format, having a N297S mutation to substantially abolish CD16A binding but otherwise equivalent to format T5, is shown in FIG. 21. To build the T5 chain L (also referred to as chain 3) the CK domain normally associated with the NKp46-1 VK domain in the NKp46-binding ABD was replaced by a CH1 domain. The T25 format differs from the T5 format by replacement of the CH1 and CK of the NKp46-binding ABD such that the CK domain normally associated with the NKp46-1 VK domain and the CH1 normally associated with the VH remain associated with therewith. In order to ensure a correct pairing between Chain L (chain 3) and Chain H (chain1) and formation of a proper disulfide bond between H and L chains, the upper-hinge residues of human IgG1 were added at the C-terminus of CH1 domain of chain L upstream of the linker connecting chain L to IL-2 variant. Other protein formats are shown in FIGS. 2B-2N. The domain structures of exemplary “T5” format multispecific protein comprising IL-15, IL-18 (IL-18v) or IFN-α (IFNαv) variants as used in the Examples are shown in FIGS. 2O, 2P, 2Q and 2R, incorporating either humanized NKp46-1 or NKp46-4 VH and VK domains.

[0615] The sequences encoding each polypeptide chain for each multispecific antigen-binding protein were inserted into the pTT-5 vector between the HindIII and BamHI restriction sites. The three vectors (prepared as endotoxin-free midipreps or maxipreps) were used to cotransfect EXPI-293F cells (Life Technologies) in the presence of PEI (37° C., 5% CO₂, 150 rpm). The cells were used to seed culture flasks at a density of 1×106 cells per ml (EXP1293 medium, Gibco). As a reference, for the “T5” constructs, we used a DNA ratio of 0.1 μg/ml (polypeptide chain I), 0.4 μg/ml (polypeptide chain II), or 0.8 μg/ml (polypeptide chain III). Valproic Acid (final concentration 0.5 mM), glucose (4 g/L) and tryptone N1 (0.5%) were added. The supernatant was harvested after six days after and passed through a Stericup filter with 0.22 μm pores.

[0616] The multispecific antigen-binding proteins were purified from the supernatant following harvesting using rProtein A Sepharose Fast Flow (GE Healthcare, reference 17-1279-03). Size Exclusion Chromatography (SEC) purifications were then performed and the proteins eluted at the expected size were finally filtered on a 0.22 μm device.

[0617] The amino acid sequence of the polypeptide chains of the multispecific proteins produced are shown below in Table 6.

TABLE 6

| Sample | Frag M (chain 2) | Frag H (chain 1) | Frag L (chain 3) |
|---|---|---|---|
| GA101- | DIVMTQTPLSLPVTPGEPA | QVQLVQSGAEVKKPGSSVKVSCKASGYA | DIQMTQSPSSLSASV |
| T5- | SISCRSSKSLLHSNGITYL | FSYSWINWVRQAPGQGLEWMGRIFPGDG | GDRVTITCRASQDIS |
| NKp46- | YWYLQKPGQSPQLLIYQMS | DTDYNGKFKGRVTITADKSTSTAYMELS | NYLNWYQQKPGKAPK |
| 1-IL2v | NLVSGVPDRFSGSGSGTDF | SLRSEDTAVYYCARNVFDGYWLVYWGQG | LLIYYTSRLHSGVPS |
| 10aa | TLKISRVEAEDVGVYYCAQ | TLVTVSSASTKGPSVFPLAPSSKSTSGG | RFSGSGSGTDFTFTI |
| linker | NLELPYTFGGGTKVEIKRT | TAALGCLVKDYFPEPVTVSWNSGALTSG | SSLQPEDIATYFCQQ |
| | VAAPSVFIFPPSDEQLKSG | VHTFPAVLQSSGLYSLSSVVTVPSSSLG | GNTRPWTFGGGTKVE |
| | TASVVCLLNNFYPREAKVQ | TQTYICNVNHKPSNTKVDKRVEPKSCDK | IKASTKGPSVFPLAP |
| | WKVDNALQSGNSQESVTEQ | THTCPPCPAPELLGGPSVFLFPPKPKDT | SSKSTSGGTAALGCL |
| | DSKDSTYSLSSTLTLSKAD | LMISRTPEVTCVVVDVSHEDPEVKENWY | VKDYFPEPVTVSWNS |
| | YEKHKVYACEVTHQGLSSP | VDGVEVHNAKTKPREEQYNSTYRVVSVL | GALTSGVHTFPAVLQ |
| | VTKSFNRGECDKTHTCPPC | TVLHQDWLNGKEYKCKVSNKALPAPIEK | SSGLYSLSSVVTVPS |
| | PAPELLGGPSVFLFPPKPK | TISKAKGQPREPQVYTLPPSREEMTKNQ | SSLGTQTYICNVNHK |
| | DTLMISRTPEVTCVVVDVS | VSLTCLVKGFYPSDIAVEWESNGQPENN | PSNTKVDKRVEPKSC |
| | HEDPEVKFNWYVDGVEVHN | YKTTPPVLDSDGSFFLYSKLTVDKSRWQ | DKTHSGSSSSGSSSS |
| | AKTKPREEQYNSTYRVVSV | QGNVFSCSVMHEALHNHYTQKSLSLSPG | APASSSTKKTQLQLE |
| | LTVLHQDWLNGKEYKCKVS | STGSQVQLVQSGAEVKKPGSSVKVSCKA | HLLLDLQMILNGINN |
| | NKALPAPIEKTISKAKGQP | SGYTFSDYVINWVRQAPGQGLEWMGEIY | YKNPKLTRMLTAKFA |
| | REPQVYTLPPSREEMTKNQ | PGSGTNYYNEKFKAKATITADKSTSTAY | MPKKATELKHLQCLE |
| | VSLTCLVKGFYPSDIAVEW | MELSSLRSEDTAVYYCARRGRYGLYAMD | EELKPLEEVLNGAQS |
| | ESNGQPENNYKTTPPVLDS | YWGQGTTVTVSSRTVAAPSVFIFPPSDE | KNFHLRPRDLISNIN |
| | DGSFFLYSKLTVDKSRWQQ | QLKSGTASVVCLLNNFYPREAKVQWKVD | VIVLELKGSETTFMC |
| | GNVFSCSVMHEALHNHYTQ | NALQSGNSQESVTEQDSKDSTYSLSSTL | EYADETATIVEFLNR |
| | KSLSLSPGK (SEQ ID | TLSKADYEKHKVYACEVTHQGLSSPVTK | WITFAQSIISTLT |
| | NO: 175) | SFNRGEC (SEQ ID NO: 176) | (SEQ ID NO: 177) |
| GA101- | DIVMTQTPLSLPVTPGEPA | QVQLVQSGAEVKKPGSSVKVSCKASGYA | DIQMTQSPSSLSASV |
| T5- | SISCRSSKSLLHSNGITYL | FSYSWINWVRQAPGQGLEWMGRIFPGDG | GDRVTITCRASQDIS |
| NKp46- | YWYLQKPGQSPQLLIYQMS | DTDYNGKFKGRVTITADKSTSTAYMELS | NYLNWYQQKPGKAPK |
| 1-IL2v | NLVSGVPDRFSGSGSGTDF | SLRSEDTAVYYCARNVFDGYWLVYWGQG | LLIYYTSRLHSGVPS |
| short | TLKISRVEAEDVGVYYCAQ | TLVTVSSASTKGPSVFPLAPSSKSTSGG | RFSGSGSGTDFTFTI |
| linker | NLELPYTFGGGTKVEIKRT | TAALGCLVKDYFPEPVTVSWNSGALTSG | SSLQPEDIATYFCQQ |
| | VAAPSVFIFPPSDEQLKSG | VHTFPAVLQSSGLYSLSSVVTVPSSSLG | GNTRPWTFGGGTKVE |
| | TASVVCLLNNFYPREAKVQ | TQTYICNVNHKPSNTKVDKRVEPKSCDK | IKASTKGPSVFPLAP |
| | WKVDNALQSGNSQESVTEQ | THTCPPCPAPELLGGPSVFLFPPKPKDT | SSKSTSGGTAALGCL |
| | DSKDSTYSLSSTLTLSKAD | LMISRTPEVTCVVVDVSHEDPEVKENWY | VKDYFPEPVTVSWNS |
| | YEKHKVYACEVTHQGLSSP | VDGVEVHNAKTKPREEQYNSTYRVVSVL | GALTSGVHTFPAVLQ |
| | VTKSFNRGECDKTHTCPPC | TVLHQDWLNGKEYKCKVSNKALPAPIEK | SSGLYSLSSVVTVPS |
| | PAPELLGGPSVFLFPPKPK | TISKAKGQPREPQVYTLPPSREEMTKNQ | SSLGTQTYICNVNHK |
| | DTLMISRTPEVTCVVVDVS | VSLTCLVKGFYPSDIAVEWESNGQPENN | PSNTKVDKRVEPKSC |
| | HEDPEVKFNWYVDGVEVHN | YKTTPPVLDSDGSFFLYSKLTVDKSRWQ | DKTHSGSSSSAPASS |
| | AKTKPREEQYNSTYRVVSV | QGNVFSCSVMHEALHNHYTQKSLSLSPG | STKKTQLQLEHLLLD |
| | LTVLHQDWLNGKEYKCKVS | STGSQVQLVQSGAEVKKPGSSVKVSCKA | LQMILNGINNYKNPK |
| | NKALPAPIEKTISKAKGQP | SGYTFSDYVINWVRQAPGQGLEWMGEIY | LTRMLTAKFAMPKKA |
| | REPQVYTLPPSREEMTKNQ | PGSGTNYYNEKFKAKATITADKSTSTAY | TELKHLQCLEEELKP |
| | VSLTCLVKGFYPSDIAVEW | MELSSLRSEDTAVYYCARRGRYGLYAMD | LEEVLNGAQSKNFHL |
| | ESNGQPENNYKTTPPVLDS | YWGQGTTVTVSSRTVAAPSVFIFPPSDE | RPRDLISNINVIVLE |
| | DGSFFLYSKLTVDKSRWQQ | QLKSGTASVVCLLNNFYPREAKVQWKVD | LKGSETTFMCEYADE |
| | GNVFSCSVMHEALHNHYTQ | NALQSGNSQESVTEQDSKDSTYSLSSTL | TATIVEFLNRWITFA |
| | KSLSLSPGK (SEQ ID | TLSKADYEKHKVYACEVTHQGLSSPVTK | QSIISTLT (SEQ |
| | NO: 178) | SFNRGEC (SEQ ID NO: 179) | ID NO: 180) |
| GA101- | DIVMTQTPLSLPVTPGEPA | QVQLVQSGAEVKKPGSSVKVSCKASGYA | DIQMTQSPSSLSASV |
| T5- | SISCRSSKSLLHSNGITYL | FSYSWINWVRQAPGQGLEWMGRIFPGDG | GDRVTITCRASQDIS |
| NKp46- | YWYLQKPGQSPQLLIYQMS | DTDYNGKFKGRVTITADKSTSTAYMELS | NYLNWYQQKPGKAPK |
| 1-IL2v | NLVSGVPDRFSGSGSGTDF | SLRSEDTAVYYCARNVFDGYWLVYWGQG | LLIYYTSRLHSGVPS |
| long | TLKISRVEAEDVGVYYCAQ | TLVTVSSASTKGPSVFPLAPSSKSTSGG | RFSGSGSGTDFTFTI |
| linker | NLELPYTFGGGTKVEIKRT | TAALGCLVKDYFPEPVTVSWNSGALTSG | SSLQPEDIATYFCQQ |
| | VAAPSVFIFPPSDEQLKSG | VHTFPAVLQSSGLYSLSSVVTVPSSSLG | GNTRPWTFGGGTKVE |
| | TASVVCLLNNFYPREAKVQ | TQTYICNVNHKPSNTKVDKRVEPKSCDK | IKASTKGPSVFPLAP |
| | WKVDNALQSGNSQESVTEQ | THTCPPCPAPELLGGPSVFLFPPKPKDT | SSKSTSGGTAALGCL |
| | DSKDSTYSLSSTLTLSKAD | LMISRTPEVTCVVVDVSHEDPEVKENWY | VKDYFPEPVTVSWNS |
| | YEKHKVYACEVTHQGLSSP | VDGVEVHNAKTKPREEQYNSTYRVVSVL | GALTSGVHTFPAVLQ |
| | VTKSFNRGECDKTHTCPPC | TVLHQDWLNGKEYKCKVSNKALPAPIEK | SSGLYSLSSVVTVPS |
| | PAPELLGGPSVFLFPPKPK | TISKAKGQPREPQVYTLPPSREEMTKNQ | SSLGTQTYICNVNHK |
| | DTLMISRTPEVTCVVVDVS | VSLTCLVKGFYPSDIAVEWESNGQPENN | PSNTKVDKRVEPKSC |
| | HEDPEVKFNWYVDGVEVHN | YKTTPPVLDSDGSFFLYSKLTVDKSRWQ | DKTHSGSSSSGSSSS |
| | AKTKPREEQYNSTYRVVSV | QGNVFSCSVMHEALHNHYTQKSLSLSPG | GSSSSAPASSSTKKT |
| | LTVLHQDWLNGKEYKCKVS | STGSQVQLVQSGAEVKKPGSSVKVSCKA | QLQLEHLLLDLQMIL |
| | NKALPAPIEKTISKAKGQP | SGYTFSDYVINWVRQAPGQGLEWMGEIY | NGINNYKNPKLTRML |
| | REPQVYTLPPSREEMTKNQ | PGSGTNYYNEKFKAKATITADKSTSTAY | TAKFAMPKKATELKH |
| | VSLTCLVKGFYPSDIAVEW | MELSSLRSEDTAVYYCARRGRYGLYAMD | LQCLEEELKPLEEVL |
| | ESNGQPENNYKTTPPVLDS | YWGQGTTVTVSSRTVAAPSVFIFPPSDE | NGAQSKNFHLRPRDL |
| | DGSFFLYSKLTVDKSRWQQ | QLKSGTASVVCLLNNFYPREAKVQWKVD | ISNINVIVLELKGSE |
| | GNVFSCSVMHEALHNHYTQ | NALQSGNSQESVTEQDSKDSTYSLSSTL | TTFMCEYADETATIV |
| | KSLSLSPGK (SEQ ID | TLSKADYEKHKVYACEVTHQGLSSPVTK | EFLNRWITFAQSIIS |
| | NO: 181) | SFNRGEC (SEQ ID NO: 182) | TLT (SEQ ID NO: |
| | | | 183) |
| GA101- | DIVMTQTPLSLPVTPGEPA | QVQLVQSGAEVKKPGSSVKVSCKASGYA | DIQMTQSPSSLSASV |
| T6- | SISCRSSKSLLHSNGITYL | FSYSWINWVRQAPGQGLEWMGRIFPGDG | GDRVTITCRASQDIS |
| NKp46- | YWYLQKPGQSPQLLIYQMS | DTDYNGKFKGRVTITADKSTSTAYMELS | NYLNWYQQKPGKAPK |
| 1-IL2v | NLVSGVPDRFSGSGSGTDF | SLRSEDTAVYYCARNVEDGYWLVYWGQG | LLIYYTSRLHSGVPS |
| | TLKISRVEAEDVGVYYCAQ | TLVTVSSASTKGPSVFPLAPSSKSTSGG | RFSGSGSGTDFTFTI |
| | NLELPYTFGGGTKVEIKRT | TAALGCLVKDYFPEPVTVSWNSGALTSG | SSLQPEDIATYFCQQ |
| | VAAPSVFIFPPSDEQLKSG | VHTFPAVLQSSGLYSLSSVVTVPSSSLG | GNTRPWTFGGGTKVE |
| | TASVVCLLNNFYPREAKVQ | TQTYICNVNHKPSNTKVDKRVEPKSCDK | IKASTKGPSVFPLAP |
| | WKVDNALQSGNSQESVTEQ | THTCPPCPAPELLGGPSVFLFPPKPKDT | SSKSTSGGTAALGCL |
| | DSKDSTYSLSSTLTLSKAD | LMISRTPEVTCVVVDVSHEDPEVKENWY | VKDYFPEPVTVSWNS |
| | YEKHKVYACEVTHQGLSSP | VDGVEVHNAKTKPREEQYSSTYRVVSVL | GALTSGVHTFPAVLQ |
| | VTKSENRGECDKTHTCPPC | TVLHQDWLNGKEYKCKVSNKALPAPIEK | SSGLYSLSSVVTVPS |
| | PAPELLGGPSVFLFPPKPK | TISKAKGQPREPQVYTLPPSREEMTKNQ | SSLGTQTYICNVNHK |
| | DTLMISRTPEVTCVVVDVS | VSLTCLVKGFYPSDIAVEWESNGQPENN | PSNTKVDKRVEPKSC |
| | HEDPEVKFNWYVDGVEVHN | YKTTPPVLDSDGSFFLYSKLTVDKSRWQ | DKTHSGSSSSGSSSS |
| | AKTKPREEQYSSTYRVVSV | QGNVFSCSVMHEALHNHYTQKSLSLSPG | APASSSTKKTQLQLE |
| | LTVLHQDWLNGKEYKCKVS | STGSQVQLVQSGAEVKKPGSSVKVSCKA | HLLLDLQMILNGINN |
| | NKALPAPIEKTISKAKGQP | SGYTFSDYVINWVRQAPGQGLEWMGEIY | YKNPKLTRMLTAKFA |
| | REPQVYTLPPSREEMTKNQ | PGSGTNYYNEKFKAKATITADKSTSTAY | MPKKATELKHLQCLE |
| | VSLTCLVKGFYPSDIAVEW | MELSSLRSEDTAVYYCARRGRYGLYAMD | EELKPLEEVLNGAQS |
| | ESNGQPENNYKTTPPVLDS | YWGQGTTVTVSSRTVAAPSVFIFPPSDE | KNFHLRPRDLISNIN |
| | DGSFFLYSKLTVDKSRWQQ | QLKSGTASVVCLLNNFYPREAKVQWKVD | VIVLELKGSETTFMC |
| | GNVFSCSVMHEALHNHYTQ | NALQSGNSQESVTEQDSKDSTYSLSSTL | EYADETATIVEFLNR |
| | KSLSLSPGK (SEQ ID | TLSKADYEKHKVYACEVTHQGLSSPVTK | WITFAQSIISTLT |
| | NO: 184) | SFNRGEC (SEQ ID NO: 185) | (SEQ ID NO: 186) |
| GA101- | DIVMTQTPLSLPVTPGEPA | QVQLVQSGAEVKKPGSSVKVSCKASGYA | DIQMTQSPSSLSASV |
| T6- | SISCRSSKSLLHSNGITYL | FSYSWINWVRQAPGQGLEWMGRIFPGDG | GDRVTITCRASQDIS |
| NKp46- | YWYLQKPGQSPQLLIYQMS | DTDYNGKFKGRVTITADKSTSTAYMELS | NYLNWYQQKPGKAPK |
| 1-IL2v2 | NLVSGVPDRFSGSGSGTDF | SLRSEDTAVYYCARNVEDGYWLVYWGQG | LLIYYTSRLHSGVPS |
| | TLKISRVEAEDVGVYYCAQ | TLVTVSSASTKGPSVFPLAPSSKSTSGG | RFSGSGSGTDFTFTI |
| | NLELPYTFGGGTKVEIKRT | TAALGCLVKDYFPEPVTVSWNSGALTSG | SSLQPEDIATYFCQQ |
| | VAAPSVFIFPPSDEQLKSG | VHTFPAVLQSSGLYSLSSVVTVPSSSLG | GNTRPWTFGGGTKVE |
| | TASVVCLLNNFYPREAKVQ | TQTYICNVNHKPSNTKVDKRVEPKSCDK | IKASTKGPSVFPLAP |
| | WKVDNALQSGNSQESVTEQ | THTCPPCPAPELLGGPSVFLFPPKPKDT | SSKSTSGGTAALGCL |
| | DSKDSTYSLSSTLTLSKAD | LMISRTPEVTCVVVDVSHEDPEVKENWY | VKDYFPEPVTVSWNS |
| | YEKHKVYACEVTHQGLSSP | VDGVEVHNAKTKPREEQYSSTYRVVSVL | GALTSGVHTFPAVLQ |
| | VTKSFNRGECDKTHTCPPC | TVLHQDWLNGKEYKCKVSNKALPAPIEK | SSGLYSLSSVVTVPS |
| | PAPELLGGPSVFLFPPKPK | TISKAKGQPREPQVYTLPPSREEMTKNQ | SSLGTQTYICNVNHK |
| | DTLMISRTPEVTCVVVDVS | VSLTCLVKGFYPSDIAVEWESNGQPENN | PSNTKVDKRVEPKSC |
| | HEDPEVKFNWYVDGVEVHN | YKTTPPVLDSDGSFFLYSKLTVDKSRWQ | DKTHSGSSSSGSSSS |
| | AKTKPREEQYSSTYRVVSV | QGNVFSCSVMHEALHNHYTQKSLSLSPG | GSSSSTKKTQLQLEH |
| | LTVLHQDWLNGKEYKCKVS | STGSQVQLVQSGAEVKKPGSSVKVSCKA | LLLDLQMILNGINNY |
| | NKALPAPIEKTISKAKGQP | SGYTFSDYVINWVRQAPGQGLEWMGEIY | KNPKLTAMLTKKFYM |
| | REPQVYTLPPSREEMTKNQ | PGSGTNYYNEKFKAKATITADKSTSTAY | PKKATELKHLQCLEE |
| | VSLTCLVKGFYPSDIAVEW | MELSSLRSEDTAVYYCARRGRYGLYAMD | ELKPLEEVLNLAQSK |
| | ESNGQPENNYKTTPPVLDS | YWGQGTTVTVSSRTVAAPSVFIFPPSDE | NFHLRPRDLISNINV |
| | DGSFFLYSKLTVDKSRWQQ | QLKSGTASVVCLLNNFYPREAKVQWKVD | IVLELKGSETTFMCE |
| | GNVFSCSVMHEALHNHYTQ | NALQSGNSQESVTEQDSKDSTYSLSSTL | YADETATIVEFLNRW |
| | KSLSLSPGK (SEQ ID | TLSKADYEKHKVYACEVTHQGLSSPVTK | ITFCQSIISTLT |
| | NO: 187) | SFNQRGEC (SEQ ID NO: 188) | (SEQ ID NO: 189) |
| GA101- | DIVMTQTPLSLPVTPGEPA | QVQLVQSGAEVKKPGSSVKVSCKASGYA | DIQMTQSPSSLSASV |
| T6- | SISCRSSKSLLHSNGITYL | FSYSWINWVRQAPGQGLEWMGRIFPGDG | GDRVTITCRASQDIS |
| NKp46- | YWYLQKPGQSPQLLIYQMS | DTDYNGKFKGRVTITADKSTSTAYMELS | NYLNWYQQKPGKAPK |
| 1-IL2v3 | NLVSGVPDRFSGSGSGTDF | SLRSEDTAVYYCARNVFDGYWLVYWGQG | LLIYYTSRLHSGVPS |
| | TLKISRVEAEDVGVYYCAQ | TLVTVSSASTKGPSVFPLAPSSKSTSGG | RFSGSGSGTDFTFTI |
| | NLELPYTFGGGTKVEIKRT | TAALGCLVKDYFPEPVTVSWNSGALTSG | SSLQPEDIATYFCQQ |
| | VAAPSVFIFPPSDEQLKSG | VHTFPAVLQSSGLYSLSSVVTVPSSSLG | GNTRPWTFGGGTKVE |
| | TASVVCLLNNFYPREAKVQ | TQTYICNVNHKPSNTKVDKRVEPKSCDK | IKASTKGPSVFPLAP |
| | WKVDNALQSGNSQESVTEQ | THTCPPCPAPELLGGPSVFLFPPKPKDT | SSKSTSGGTAALGCL |
| | DSKDSTYSLSSTLTLSKAD | LMISRTPEVTCVVVDVSHEDPEVKENWY | VKDYFPEPVTVSWNS |
| | YEKHKVYACEVTHQGLSSP | VDGVEVHNAKTKPREEQYSSTYRVVSVL | GALTSGVHTFPAVLQ |
| | VTKSFNRGECDKTHTCPPC | TVLHQDWLNGKEYKCKVSNKALPAPIEK | SSGLYSLSSVVTVPS |
| | PAPELLGGPSVFLFPPKPK | TISKAKGQPREPQVYTLPPSREEMTKNQ | SSLGTQTYICNVNHK |
| | DTLMISRTPEVTCVVVDVS | VSLTCLVKGFYPSDIAVEWESNGQPENN | PSNTKVDKRVEPKSC |
| | HEDPEVKFNWYVDGVEVHN | YKTTPPVLDSDGSFFLYSKLTVDKSRWQ | DKTHSGSSSSGSSSS |
| | AKTKPREEQYSSTYRVVSV | QGNVFSCSVMHEALHNHYTQKSLSLSPG | GSSSSTKKTQLQLEH |
| | LTVLHQDWLNGKEYKCKVS | STGSQVQLVQSGAEVKKPGSSVKVSCKA | LLLDLQMILNGINNY |
| | NKALPAPIEKTISKAKGQP | SGYTFSDYVINWVRQAPGQGLEWMGEIY | KNPKLTAMLAKKFYM |
| | REPQVYTLPPSREEMTKNQ | PGSGTNYYNEKFKAKATITADKSTSTAY | PKKATELKHLQCLEE |
| | VSLTCLVKGFYPSDIAVEW | MELSSLRSEDTAVYYCARRGRYGLYAMD | ELKPLEEVLNLAQSK |
| | ESNGQPENNYKTTPPVLDS | YWGQGTTVTVSSRTVAAPSVFIFPPSDE | NFHLRPRDLISNINV |
| | DGSFFLYSKLTVDKSRWQQ | QLKSGTASVVCLLNNFYPREAKVQWKVD | IVLELKGSETTFMCE |
| | GNVFSCSVMHEALHNHYTQ | NALQSGNSQESVTEQDSKDSTYSLSSTL | YADETATIVEFLNRW |
| | KSLSLSPGK (SEQ ID | TLSKADYEKHKVYACEVTHQGLSSPVTK | ITFCQSIISTLT |
| | NO: 190) | SENRGEC (SEQ ID NO: 191) | (SEQ ID NO: 192) |
| GA101- | DIVMTQTPLSLPVTPGEPA | QVQLVQSGAEVKKPGSSVKVSCKASGYA | DIQMTQSPSSLSASV |
| T5- | SISCRSSKSLLHSNGITYL | FSYSWINWVRQAPGQGLEWMGRIFPGDG | GDRVTITCRASENIY |
| NKp46- | YWYLQKPGQSPQLLIYQMS | DTDYNGKFKGRVTITADKSTSTAYMELS | SNLAWFQQKPGKAPK |
| 4-IL2v | NLVSGVPDRFSGSGSGTDF | SLRSEDTAVYYCARNVFDGYWLVYWGQG | LLVYAATNLADGVPS |
| | TLKISRVEAEDVGVYYCAQ | TLVTVSSASTKGPSVFPLAPSSKSTSGG | RFSGSGSGTDYTLTI |
| | NLELPYTFGGGTKVEIKRT | TAALGCLVKDYFPEPVTVSWNSGALTSG | SSLQPEDFATYYCQH |
| | VAAPSVFIFPPSDEQLKSG | VHTFPAVLQSSGLYSLSSVVTVPSSSLG | FWGTPRTFGGGTKVE |
| | TASVVCLLNNFYPREAKVQ | TQTYICNVNHKPSNTKVDKRVEPKSCDK | IKASTKGPSVFPLAP |
| | WKVDNALQSGNSQESVTEQ | THTCPPCPAPELLGGPSVFLFPPKPKDT | SSKSTSGGTAALGCL |
| | DSKDSTYSLSSTLTLSKAD | LMISRTPEVTCVVVDVSHEDPEVKENWY | VKDYFPEPVTVSWNS |
| | YEKHKVYACEVTHQGLSSP | VDGVEVHNAKTKPREEQYNSTYRVVSVL | GALTSGVHTFPAVLQ |
| | VTKSFNRGECDKTHTCPPC | TVLHQDWLNGKEYKCKVSNKALPAPIEK | SSGLYSLSSVVTVPS |
| | PAPELLGGPSVFLFPPKPK | TISKAKGQPREPQVYTLPPSREEMTKNQ | SSLGTQTYICNVNHK |
| | DTLMISRTPEVTCVVVDVS | VSLTCLVKGFYPSDIAVEWESNGQPENN | PSNTKVDKRVEPKSC |
| | HEDPEVKFNWYVDGVEVHN | YKTTPPVLDSDGSFFLYSKLTVDKSRWQ | DKTHSGSSSSGSSSS |
| | AKTKPREEQYNSTYRVVSV | QGNVFSCSVMHEALHNHYTQKSLSLSPG | APASSSTKKTQLQLE |
| | LTVLHQDWLNGKEYKCKVS | STGSQVQLVQSGAEVKKPGASVKVSCKA | HLLLDLQMILNGINN |
| | NKALPAPIEKTISKAKGQP | SGYTFTSFTMHWVRQAPGQGLEWIGYIN | YKNPKLTRMLTAKFA |
| | REPQVYTLPPSREEMTKNQ | PSSGYTEYNQKFKDRVTITADKSTSTAY | MPKKATELKHLQCLE |
| | VSLTCLVKGFYPSDIAVEW | MELSSLRSEDTAVYYCVRGSSRGFDYWG | EELKPLEEVLNGAQS |
| | ESNGQPENNYKTTPPVLDS | QGTLVTVSSRTVAAPSVFIFPPSDEQLK | KNFHLRPRDLISNIN |
| | DGSFFLYSKLTVDKSRWQQ | SGTASVVCLLNNFYPREAKVQWKVDNAL | VIVLELKGSETTFMC |
| | GNVFSCSVMHEALHNHYTQ | QSGNSQESVTEQDSKDSTYSLSSTLTLS | EYADETATIVEFLNR |
| | KSLSLSPGK (SEQ ID | KADYEKHKVYACEVTHQGLSSPVTKSEN | WITFAQSIISTLT |
| | NO: 193) | RGEC (SEQ ID NO: 194) | (SEQ ID NO: 195) |
| GA101- | DIVMTQTPLSLPVTPGEPA | QVQLVQSGAEVKKPGSSVKVSCKASGYA | DIQMTQSPSSLSASV |
| T6- | SISCRSSKSLLHSNGITYL | FSYSWINWVRQAPGQGLEWMGRIFPGDG | GDRVTITCRASENIY |
| NKp46- | YWYLQKPGQSPQLLIYQMS | DTDYNGKFKGRVTITADKSTSTAYMELS | SNLAWFQQKPGKAPK |
| 4-IL2v | NLVSGVPDRFSGSGSGTDF | SLRSEDTAVYYCARNVFDGYWLVYWGQG | LLVYAATNLADGVPS |
| | TLKISRVEAEDVGVYYCAQ | TLVTVSSASTKGPSVFPLAPSSKSTSGG | RFSGSGSGTDYTLTI |
| | NLELPYTFGGGTKVEIKRT | TAALGCLVKDYFPEPVTVSWNSGALTSG | SSLQPEDFATYYCQH |
| | VAAPSVFIFPPSDEQLKSG | VHTFPAVLQSSGLYSLSSVVTVPSSSLG | FWGTPRTFGGGTKVE |
| | TASVVCLLNNFYPREAKVQ | TQTYICNVNHKPSNTKVDKRVEPKSCDK | IKASTKGPSVFPLAP |
| | WKVDNALQSGNSQESVTEQ | THTCPPCPAPELLGGPSVFLFPPKPKDT | SSKSTSGGTAALGCL |
| | DSKDSTYSLSSTLTLSKAD | LMISRTPEVTCVVVDVSHEDPEVKENWY | VKDYFPEPVTVSWNS |
| | YEKHKVYACEVTHQGLSSP | VDGVEVHNAKTKPREEQYSSTYRVVSVL | GALTSGVHTFPAVLQ |
| | VTKSFNRGECDKTHTCPPC | TVLHQDWLNGKEYKCKVSNKALPAPIEK | SSGLYSLSSVVTVPS |
| | PAPELLGGPSVFLFPPKPK | TISKAKGQPREPQVYTLPPSREEMTKNQ | SSLGTQTYICNVNHK |
| | DTLMISRTPEVTCVVVDVS | VSLTCLVKGFYPSDIAVEWESNGQPENN | PSNTKVDKRVEPKSC |
| | HEDPEVKFNWYVDGVEVHN | YKTTPPVLDSDGSFFLYSKLTVDKSRWQ | DKTHSGSSSSGSSSS |
| | AKTKPREEQYSSTYRVVSV | QGNVFSCSVMHEALHNHYTQKSLSLSPG | APASSSTKKTQLQLE |
| | LTVLHQDWLNGKEYKCKVS | STGSQVQLVQSGAEVKKPGASVKVSCKA | HLLLDLQMILNGINN |
| | NKALPAPIEKTISKAKGQP | SGYTFTSFTMHWVRQAPGQGLEWIGYIN | YKNPKLTRMLTAKFA |
| | REPQVYTLPPSREEMTKNQ | PSSGYTEYNQKFKDRVTITADKSTSTAY | MPKKATELKHLQCLE |
| | VSLTCLVKGFYPSDIAVEW | MELSSLRSEDTAVYYCVRGSSRGFDYWG | EELKPLEEVLNGAQS |
| | ESNGQPENNYKTTPPVLDS | QGTLVTVSSRTVAAPSVFIFPPSDEQLK | KNFHLRPRDLISNIN |
| | DGSFFLYSKLTVDKSRWQQ | SGTASVVCLLNNFYPREAKVQWKVDNAL | VIVLELKGSETTFMC |
| | GNVFSCSVMHEALHNHYTQ | QSGNSQESVTEQDSKDSTYSLSSTLTLS | EYADETATIVEFLNR |
| | KSLSLSPGK (SEQ ID | KADYEKHKVYACEVTHQGLSSPVTKSEN | WITFAQSIISTLT |
| | NO: 196) | RGEC (SEQ ID NO: 197) | (SEQ ID NO: 198) |
| GA101- | DIVMTQTPLSLPVTPGEPA | QVQLVQSGAEVKKPGSSVKVSCKASGYA | DIQMTQSPSSLSASV |
| T25- | SISCRSSKSLLHSNGITYL | FSYSWINWVRQAPGQGLEWMGRIFPGDG | GDRVTITCRASQDIS |
| NKp46- | YWYLQKPGQSPQLLIYQMS | DTDYNGKFKGRVTITADKSTSTAYMELS | NYLNWYQQKPGKAPK |
| 1-IL2v | NLVSGVPDRESGSGSGTDE | SLRSEDTAVYYCARNVFDGYWLVYWGQG | LLIYYTSRLHSGVPS |
| | TLKISRVEAEDVGVYYCAQ | TLVTVSSASTKGPSVFPLAPSSKSTSGG | RFSGSGSGTDFTFTI |
| | NLELPYTFGGGTKVEIKRT | TAALGCLVKDYFPEPVTVSWNSGALTSG | SSLQPEDIATYFCQQ |
| | VAAPSVFIFPPSDEQLKSG | VHTFPAVLQSSGLYSLSSVVTVPSSSLG | GNTRPWTFGGGTKVE |
| | TASVVCLLNNFYPREAKVQ | TQTYICNVNHKPSNTKVDKRVEPKSCDK | IKRTVAAPSVFIFPP |
| | WKVDNALQSGNSQESVTEQ | THTCPPCPAPELLGGPSVFLFPPKPKDT | SDEQLKSGTASVVCL |
| | DSKDSTYSLSSTLTLSKAD | LMISRTPEVTCVVVDVSHEDPEVKENWY | LNNFYPREAKVQWKV |
| | YEKHKVYACEVTHQGLSSP | VDGVEVHNAKTKPREEQYNSTYRVVSVL | DNALQSGNSQESVTE |
| | VTKSFNRGECDKTHTCPPC | TVLHQDWLNGKEYKCKVSNKALPAPIEK | QDSKDSTYSLSSTLT |
| | PAPELLGGPSVFLFPPKPK | TISKAKGQPREPQVYTLPPSREEMTKNQ | LSKADYEKHKVYACE |
| | DTLMISRTPEVTCVVVDVS | VSLTCLVKGFYPSDIAVEWESNGQPENN | VTHQGLSSPVTKSEN |
| | HEDPEVKFNWYVDGVEVHN | YKTTPPVLDSDGSFFLYSKLTVDKSRWQ | RGECGSSSSGSSSSA |
| | AKTKPREEQYNSTYRVVSV | QGNVFSCSVMHEALHNHYTQKSLSLSPG | PASSSTKKTQLQLEH |
| | LTVLHQDWLNGKEYKCKVS | STGSQVQLVQSGAEVKKPGSSVKVSCKA | LLLDLQMILNGINNY |
| | NKALPAPIEKTISKAKGQP | SGYTFSDYVINWVRQAPGQGLEWMGEIY | KNPKLTRMLTAKFAM |
| | REPQVYTLPPSREEMTKNQ | PGSGTNYYNEKFKAKATITADKSTSTAY | PKKATELKHLQCLEE |
| | VSLTCLVKGFYPSDIAVEW | MELSSLRSEDTAVYYCARRGRYGLYAMD | ELKPLEEVLNGAQSK |
| | ESNGQPENNYKTTPPVLDS | YWGQGTTVTVSSASTKGPSVFPLAPSSK | NFHLRPRDLISNINV |
| | DGSFFLYSKLTVDKSRWQQ | STSGGTAALGCLVKDYFPEPVTVSWNSG | IVLELKGSETTFMCE |
| | GNVFSCSVMHEALHNHYTQ | ALTSGVHTFPAVLQSSGLYSLSSVVTVP | YADETATIVEFLNRW |
| | KSLSLSPGK (SEQ ID | SSSLGTQTYICNVNHKPSNTKVDKRVEP | ITFAQSIISTLT |
| | NO: 199) | KSCDKTHS (SEQ ID NO: 200) | (SEQ ID NO: 201) |
| GA101- | DIVMTQTPLSLPVTPGEPA | QVQLVQSGAEVKKPGSSVKVSCKASGYA | DIQMTQSPSSLSASV |
| T26- | SISCRSSKSLLHSNGITYL | FSYSWINWVRQAPGQGLEWMGRIFPGDG | GDRVTITCRASQDIS |
| NKp46- | YWYLQKPGQSPQLLIYQMS | DTDYNGKFKGRVTITADKSTSTAYMELS | NYLNWYQQKPGKAPK |
| 1-IL2v | NLVSGVPDRFSGSGSGTDF | SLRSEDTAVYYCARNVFDGYWLVYWGQG | LLIYYTSRLHSGVPS |
| | TLKISRVEAEDVGVYYCAQ | TLVTVSSASTKGPSVFPLAPSSKSTSGG | RFSGSGSGTDFTFTI |
| | NLELPYTFGGGTKVEIKRT | TAALGCLVKDYFPEPVTVSWNSGALTSG | SSLQPEDIATYFCQQ |
| | VAAPSVFIFPPSDEQLKSG | VHTFPAVLQSSGLYSLSSVVTVPSSSLG | GNTRPWTFGGGTKVE |
| | TASVVCLLNNFYPREAKVQ | TQTYICNVNHKPSNTKVDKRVEPKSCDK | IKRTVAAPSVFIFPP |
| | WKVDNALQSGNSQESVTEQ | THTCPPCPAPELLGGPSVFLFPPKPKDT | SDEQLKSGTASVVCL |
| | DSKDSTYSLSSTLTLSKAD | LMISRTPEVTCVVVDVSHEDPEVKENWY | LNNFYPREAKVQWKV |
| | YEKHKVYACEVTHQGLSSP | VDGVEVHNAKTKPREEQYSSTYRVVSVL | DNALQSGNSQESVTE |
| | VTKSFNRGECDKTHTCPPC | TVLHQDWLNGKEYKCKVSNKALPAPIEK | QDSKDSTYSLSSTLT |
| | PAPELLGGPSVFLFPPKPK | TISKAKGQPREPQVYTLPPSREEMTKNQ | LSKADYEKHKVYACE |
| | DTLMISRTPEVTCVVVDVS | VSLTCLVKGFYPSDIAVEWESNGQPENN | VTHQGLSSPVTKSEN |
| | HEDPEVKFNWYVDGVEVHN | YKTTPPVLDSDGSFFLYSKLTVDKSRWQ | RGECGSSSSGSSSSA |
| | AKTKPREEQYSSTYRVVSV | QGNVFSCSVMHEALHNHYTQKSLSLSPG | PASSSTKKTQLQLEH |
| | LTVLHQDWLNGKEYKCKVS | STGSQVQLVQSGAEVKKPGSSVKVSCKA | LLLDLQMILNGINNY |
| | NKALPAPIEKTISKAKGQP | SGYTFSDYVINWVRQAPGQGLEWMGEIY | KNPKLTRMLTAKFAM |
| | REPQVYTLPPSREEMTKNQ | PGSGTNYYNEKFKAKATITADKSTSTAY | PKKATELKHLQCLEE |
| | VSLTCLVKGFYPSDIAVEW | MELSSLRSEDTAVYYCARRGRYGLYAMD | ELKPLEEVLNGAQSK |
| | ESNGQPENNYKTTPPVLDS | YWGQGTTVTVSSASTKGPSVFPLAPSSK | NFHLRPRDLISNINV |
| | DGSFFLYSKLTVDKSRWQQ | STSGGTAALGCLVKDYFPEPVTVSWNSG | IVLELKGSETTFMCE |
| | GNVFSCSVMHEALHNHYTQ | ALTSGVHTFPAVLQSSGLYSLSSVVTVP | YADETATIVEFLNRW |
| | KSLSLSPGK (SEQ ID | SSSLGTQTYICNVNHKPSNTKVDKRVEP | ITFAQSIISTLT |
| | NO: 202) | KSCDKTHS (SEQ ID NO: 203) | (SEQ ID NO: 204) |
| GA101- | DIVMTQTPLSLPVTPGEPA | QVQLVQSGAEVKKPGSSVKVSCKASGYA | |
| T13A- | SISCRSSKSLLHSNGITYL | FSYSWINWVRQAPGQGLEWMGRIFPGDG | |
| NKp46- | YWYLQKPGQSPQLLIYQMS | DTDYNGKFKGRVTITADKSTSTAYMELS | |
| 1-IL2v | NLVSGVPDRFSGSGSGTDF | SLRSEDTAVYYCARNVFDGYWLVYWGQG | |
| | TLKISRVEAEDVGVYYCAQ | TLVTVSSASTKGPSVFPLAPSSKSTSGG | |
| | NLELPYTFGGGTKVEIKRT | TAALGCLVKDYFPEPVTVSWNSGALTSG | |
| | VAAPSVFIFPPSDEQLKSG | VHTFPAVLQSSGLYSLSSVVTVPSSSLG | |
| | TASVVCLLNNFYPREAKVQ | TQTYICNVNHKPSNTKVDKRVEPKSCDK | |
| | WKVDNALQSGNSQESVTEQ | THTCPPCPAPELLGGPSVFLFPPKPKDT | |
| | DSKDSTYSLSSTLTLSKAD | LMISRTPEVTCVVVDVSHEDPEVKENWY | |
| | YEKHKVYACEVTHQGLSSP | VDGVEVHNAKTKPREEQYNSTYRVVSVL | |
| | VTKSFNRGECDKTHTCPPC | TVLHQDWLNGKEYKCKVSNKALPAPIEK | |
| | PAPELLGGPSVFLFPPKPK | TISKAKGQPREPQVYTLPPSREEMTKNQ | |
| | DTLMISRTPEVTCVVVDVS | VSLTCLVKGFYPSDIAVEWESNGQPENN | |
| | HEDPEVKFNWYVDGVEVHN | YKTTPPVLDSDGSFFLYSKLTVDKSRWQ | |
| | AKTKPREEQYNSTYRVVSV | QGNVFSCSVMHEALHNHYTQKSLSLSPG | |
| | LTVLHQDWLNGKEYKCKVS | STGSQVQLVQSGAEVKKPGSSVKVSCKA | |
| | NKALPAPIEKTISKAKGQP | SGYTFSDYVINWVRQAPGQGLEWMGEIY | |
| | REPQVYTLPPSREEMTKNQ | PGSGTNYYNEKFKAKATITADKSTSTAY | |
| | VSLTCLVKGFYPSDIAVEW | MELSSLRSEDTAVYYCARRGRYGLYAMD | |
| | ESNGQPENNYKTTPPVLDS | YWGQGTTVTVSSVEGGSGGSGGSGGSGG | |
| | DGSFFLYSKLTVDKSRWQQ | VDDIQMTQSPSSLSASVGDRVTITCRAS | |
| | GNVFSCSVMHEALHNRFTQ | QDISNYLNWYQQKPGKAPKLLIYYTSRL | |
| | KSLSLSPGK (SEQ ID | HSGVPSRFSGSGSGTDFTFTISSLQPED | |
| | NO: 205) | IATYFCQQGNTRPWTFGGGTKVEIKGSS | |
| | | SSGSSSSAPASSSTKKTQLQLEHLLLDL | |
| | | QMILNGINNYKNPKLTRMLTAKFAMPKK | |
| | | ATELKHLQCLEEELKPLEEVLNGAQSKN | |
| | | FHLRPRDLISNINVIVLELKGSETTFMC | |
| | | EYADETATIVEFLNRWITFAQSIISTLT | |
| | | (SEQ ID NO: 206) | |
| GA101- | DIVMTQTPLSLPVTPGEPA | QVQLVQSGAEVKKPGSSVKVSCKASGYA | |
| T14A- | SISCRSSKSLLHSNGITYL | FSYSWINWVRQAPGQGLEWMGRIFPGDG | |
| NKp46- | YWYLQKPGQSPQLLIYQMS | DTDYNGKFKGRVTITADKSTSTAYMELS | |
| 1-IL2v | NLVSGVPDRFSGSGSGTDF | SLRSEDTAVYYCARNVFDGYWLVYWGQG | |
| | TLKISRVEAEDVGVYYCAQ | TLVTVSSASTKGPSVFPLAPSSKSTSGG | |
| | NLELPYTFGGGTKVEIKRT | TAALGCLVKDYFPEPVTVSWNSGALTSG | |
| | VAAPSVFIFPPSDEQLKSG | VHTFPAVLQSSGLYSLSSVVTVPSSSLG | |
| | TASVVCLLNNFYPREAKVQ | TQTYICNVNHKPSNTKVDKRVEPKSCDK | |
| | WKVDNALQSGNSQESVTEQ | THTCPPCPAPELLGGPSVFLFPPKPKDT | |
| | DSKDSTYSLSSTLTLSKAD | LMISRTPEVTCVVVDVSHEDPEVKENWY | |
| | YEKHKVYACEVTHQGLSSP | VDGVEVHNAKTKPREEQYSSTYRVVSVL | |
| | VTKSFNRGECDKTHTCPPC | TVLHQDWLNGKEYKCKVSNKALPAPIEK | |
| | PAPELLGGPSVFLFPPKPK | TISKAKGQPREPQVYTLPPSREEMTKNQ | |
| | DTLMISRTPEVTCVVVDVS | VSLTCLVKGFYPSDIAVEWESNGQPENN | |
| | HEDPEVKFNWYVDGVEVHN | YKTTPPVLDSDGSFFLYSKLTVDKSRWQ | |
| | AKTKPREEQYSSTYRVVSV | QGNVFSCSVMHEALHNHYTQKSLSLSPG | |
| | LTVLHQDWLNGKEYKCKVS | STGSQVQLVQSGAEVKKPGSSVKVSCKA | |
| | NKALPAPIEKTISKAKGQP | SGYTFSDYVINWVRQAPGQGLEWMGEIY | |
| | REPQVYTLPPSREEMTKNQ | PGSGTNYYNEKFKAKATITADKSTSTAY | |
| | VSLTCLVKGFYPSDIAVEW | MELSSLRSEDTAVYYCARRGRYGLYAMD | |
| | ESNGQPENNYKTTPPVLDS | YWGQGTTVTVSSVEGGSGGSGGSGGSGG | |
| | DGSFFLYSKLTVDKSRWQQ | VDDIQMTQSPSSLSASVGDRVTITCRAS | |
| | GNVFSCSVMHEALHNRFTQ | QDISNYLNWYQQKPGKAPKLLIYYTSRL | |
| | KSLSLSPGK (SEQ ID | HSGVPSRFSGSGSGTDFTFTISSLQPED | |
| | NO: 207) | IATYFCQQGNTRPWTFGGGTKVEIKGSS | |
| | | SSGSSSSAPASSSTKKTQLQLEHLLLDL | |
| | | QMILNGINNYKNPKLTRMLTAKFAMPKK | |
| | | ATELKHLQCLEEELKPLEEVLNGAQSKN | |
| | | FHLRPRDLISNINVIVLELKGSETTFMC | |
| | | EYADETATIVEFLNRWITFAQSIISTLT | |
| | | (SEQ ID NO: 208) | |
| HER2 | DIQMTQSPSSLSASVGDRV | EVQLVESGGGLVQPGGSLRLSCAASGEN | DIQMTQSPSSLSASV |
| (trastu)- | TITCRASQDVNTAVAWYQQ | IKDTYIHWVRQAPGKGLEWVARIYPTNG | GDRVTITCRASQDIS |
| T5- | KPGKAPKLLIYSASFLYSG | YTRYADSVKGRFTISADTSKNTAYLQMN | NYLNWYQQKPGKAPK |
| NKp46- | VPSRFSGSRSGTDFTLTIS | SLRAEDTAVYYCSRWGGDGFYAMDYWGQ | LLIYYTSRLHSGVPS |
| 1-IL2v | SLQPEDFATYYCQQHYTTP | GTLVTVSSASTKGPSVFPLAPSSKSTSG | RFSGSGSGTDFTFTI |
| | PTFGQGTKVEIKRTVAAPS | GTAALGCLVKDYFPEPVTVSWNSGALTS | SSLQPEDIATYFCQQ |
| | VFIFPPSDEQLKSGTASVV | GVHTFPAVLQSSGLYSLSSVVTVPSSSL | GNTRPWTFGGGTKVE |
| | CLLNNFYPREAKVQWKVDN | GTQTYICNVNHKPSNTKVDKRVEPKSCD | IKASTKGPSVFPLAP |
| | ALQSGNSQESVTEQDSKDS | KTHTCPPCPAPELLGGPSVFLFPPKPKD | SSKSTSGGTAALGCL |
| | TYSLSSTLTLSKADYEKHK | TLMISRTPEVTCVVVDVSHEDPEVKENW | VKDYFPEPVTVSWNS |
| | VYACEVTHQGLSSPVTKSF | YVDGVEVHNAKTKPREEQYNSTYRVVSV | GALTSGVHTFPAVLQ |
| | NRGECDKTHTCPPCPAPEL | LTVLHQDWLNGKEYKCKVSNKALPAPIE | SSGLYSLSSVVTVPS |
| | LGGPSVFLFPPKPKDTLMI | KTISKAKGQPREPQVYTLPPSREEMTKN | SSLGTQTYICNVNHK |
| | SRTPEVTCVVVDVSHEDPE | QVSLTCLVKGFYPSDIAVEWESNGQPEN | PSNTKVDKRVEPKSC |
| | VKFNWYVDGVEVHNAKTKP | NYKTTPPVLDSDGSFFLYSKLTVDKSRW | DKTHSGSSSSGSSSS |
| | REEQYNSTYRVVSVLTVLH | QQGNVFSCSVMHEALHNHYTQKSLSLSP | APASSSTKKTQLQLE |
| | QDWLNGKEYKCKVSNKALP | GSTGSQVQLVQSGAEVKKPGSSVKVSCK | HLLLDLQMILNGINN |
| | APIEKTISKAKGQPREPQV | ASGYTFSDYVINWVRQAPGQGLEWMGEI | YKNPKLTRMLTAKFA |
| | YTLPPSREEMTKNQVSLTC | YPGSGTNYYNEKFKAKATITADKSTSTA | MPKKATELKHLQCLE |
| | LVKGFYPSDIAVEWESNGQ | YMELSSLRSEDTAVYYCARRGRYGLYAM | EELKPLEEVLNGAQS |
| | PENNYKTTPPVLDSDGSFF | DYWGQGTTVTVSSRTVAAPSVFIFPPSD | KNFHLRPRDLISNIN |
| | LYSKLTVDKSRWQQGNVFS | EQLKSGTASVVCLLNNFYPREAKVQWKV | VIVLELKGSETTFMC |
| | CSVMHEALHNHYTQKSLSL | DNALQSGNSQESVTEQDSKDSTYSLSST | EYADETATIVEFLNR |
| | SPGK | LTLSKADYEKHKVYACEVTHQGLSSPVT | WITFAQSIISTLT |
| | (SEQ ID NO: 209) | KSENRGEC (SEQ ID NO: 210) | (SEQ ID NO: 211) |
| HER2 | DIQMTQSPSSLSASVGDRV | EVQLVESGGGLVQPGGSLRLSCAASGEN | DIQMTQSPSSLSASV |
| (trastu)- | TITCRASQDVNTAVAWYQQ | IKDTYIHWVRQAPGKGLEWVARIYPTNG | GDRVTITCRASQDIS |
| T25- | KPGKAPKLLIYSASFLYSG | YTRYADSVKGRFTISADTSKNTAYLQMN | NYLNWYQQKPGKAPK |
| NKp46- | VPSRFSGSRSGTDFTLTIS | SLRAEDTAVYYCSRWGGDGFYAMDYWGQ | LLIYYTSRLHSGVPS |
| 1-IL2v | SLQPEDFATYYCQQHYTTP | GTLVTVSSASTKGPSVFPLAPSSKSTSG | RFSGSGSGTDFTFTI |
| | PTFGQGTKVEIKRTVAAPS | GTAALGCLVKDYFPEPVTVSWNSGALTS | SSLQPEDIATYFCQQ |
| | VFIFPPSDEQLKSGTASVV | GVHTFPAVLQSSGLYSLSSVVTVPSSSL | GNTRPWTFGGGTKVE |
| | CLLNNFYPREAKVQWKVDN | GTQTYICNVNHKPSNTKVDKRVEPKSCD | IKRTVAAPSVFIFPP |
| | ALQSGNSQESVTEQDSKDS | KTHTCPPCPAPELLGGPSVFLFPPKPKD | SDEQLKSGTASVVCL |
| | TYSLSSTLTLSKADYEKHK | TLMISRTPEVTCVVVDVSHEDPEVKENW | LNNFYPREAKVQWKV |
| | VYACEVTHQGLSSPVTKSF | YVDGVEVHNAKTKPREEQYNSTYRVVSV | DNALQSGNSQESVTE |
| | NRGECDKTHTCPPCPAPEL | LTVLHQDWLNGKEYKCKVSNKALPAPIE | QDSKDSTYSLSSTLT |
| | LGGPSVFLFPPKPKDTLMI | KTISKAKGQPREPQVYTLPPSREEMTKN | LSKADYEKHKVYACE |
| | SRTPEVTCVVVDVSHEDPE | QVSLTCLVKGFYPSDIAVEWESNGQPEN | VTHQGLSSPVTKSEN |
| | VKFNWYVDGVEVHNAKTKP | NYKTTPPVLDSDGSFFLYSKLTVDKSRW | RGECGSSSSGSSSSA |
| | REEQYNSTYRVVSVLTVLH | QQGNVFSCSVMHEALHNHYTQKSLSLSP | PASSSTKKTQLQLEH |
| | QDWLNGKEYKCKVSNKALP | GSTGSQVQLVQSGAEVKKPGSSVKVSCK | LLLDLQMILNGINNY |
| | APIEKTISKAKGQPREPQV | ASGYTFSDYVINWVRQAPGQGLEWMGEI | KNPKLTRMLTAKFAM |
| | YTLPPSREEMTKNQVSLTC | YPGSGTNYYNEKFKAKATITADKSTSTA | PKKATELKHLQCLEE |
| | LVKGFYPSDIAVEWESNGQ | YMELSSLRSEDTAVYYCARRGRYGLYAM | ELKPLEEVLNGAQSK |
| | PENNYKTTPPVLDSDGSFF | DYWGQGTTVTVSSASTKGPSVFPLAPSS | NFHLRPRDLISNINV |
| | LYSKLTVDKSRWQQGNVFS | KSTSGGTAALGCLVKDYFPEPVTVSWNS | IVLELKGSETTFMCE |
| | CSVMHEALHNHYTQKSLSL | GALTSGVHTFPAVLQSSGLYSLSSVVTV | YADETATIVEFLNRW |
| | SPGK | PSSSLGTQTYICNVNHKPSNTKVDKRVE | ITFAQSIISTLT |
| | (SEQ ID NO: 212) | PKSCDKTHS (SEQ ID NO: 213) | (SEQ ID NO: 214) |
| EGFR | DILLTQSPVILSVSPGERV | QVQLKQSGPGLVQPSQSLSITCTVSGES | DIQMTQSPSSLSASV |
| (Cetux)- | SFSCRASQSIGTNIHWYQQ | LTNYGVHWVRQSPGKGLEWLGVIWSGGN | GDRVTITCRASQDIS |
| T5- | RTNGSPRLLIKYASESISG | TDYNTPFTSRLSINKDNSKSQVFFKMNS | NYLNWYQQKPGKAPK |
| NKp46- | IPSRFSGSGSGTDFTLSIN | LQSNDTAIYYCARALTYYDYEFAYWGQG | LLIYYTSRLHSGVPS |
| 1-IL2v | SVESEDIADYYCQQNNNWP | TLVTVSAASTKGPSVFPLAPSSKSTSGG | RFSGSGSGTDFTFTI |
| | TTFGAGTKLELKRTVAAPS | TAALGCLVKDYFPEPVTVSWNSGALTSG | SSLQPEDIATYFCQQ |
| | VFIFPPSDEQLKSGTASVV | VHTFPAVLQSSGLYSLSSVVTVPSSSLG | GNTRPWTFGGGTKVE |
| | CLLNNFYPREAKVQWKVDN | TQTYICNVNHKPSNTKVDKRVEPKSCDK | IKASTKGPSVFPLAP |
| | ALQSGNSQESVTEQDSKDS | THTCPPCPAPELLGGPSVFLFPPKPKDT | SSKSTSGGTAALGCL |
| | TYSLSSTLTLSKADYEKHK | LMISRTPEVTCVVVDVSHEDPEVKENWY | VKDYFPEPVTVSWNS |
| | VYACEVTHQGLSSPVTKSF | VDGVEVHNAKTKPREEQYNSTYRVVSVL | GALTSGVHTFPAVLQ |
| | NRGECDKTHTCPPCPAPEL | TVLHQDWLNGKEYKCKVSNKALPAPIEK | SSGLYSLSSVVTVPS |
| | LGGPSVFLFPPKPKDTLMI | TISKAKGQPREPQVYTLPPSREEMTKNQ | SSLGTQTYICNVNHK |
| | SRTPEVTCVVVDVSHEDPE | VSLTCLVKGFYPSDIAVEWESNGQPENN | PSNTKVDKRVEPKSC |
| | VKFNWYVDGVEVHNAKTKP | YKTTPPVLDSDGSFFLYSKLTVDKSRWQ | DKTHSGSSSSGSSSS |
| | REEQYNSTYRVVSVLTVLH | QGNVFSCSVMHEALHNHYTQKSLSLSPG | APASSSTKKTQLQLE |
| | QDWLNGKEYKCKVSNKALP | STGSQVQLVQSGAEVKKPGSSVKVSCKA | HLLLDLQMILNGINN |
| | APIEKTISKAKGQPREPQV | SGYTFSDYVINWVRQAPGQGLEWMGEIY | YKNPKLTRMLTAKFA |
| | YTLPPSREEMTKNQVSLTC | PGSGTNYYNEKFKAKATITADKSTSTAY | MPKKATELKHLQCLE |
| | LVKGFYPSDIAVEWESNGQ | MELSSLRSEDTAVYYCARRGRYGLYAMD | EELKPLEEVLNGAQS |
| | PENNYKTTPPVLDSDGSFF | YWGQGTTVTVSSRTVAAPSVFIFPPSDE | KNFHLRPRDLISNIN |
| | LYSKLTVDKSRWQQGNVES | QLKSGTASVVCLLNNFYPREAKVQWKVD | VIVLELKGSETTFMC |
| | CSVMHEALHNHYTQKSLSL | NALQSGNSQESVTEQDSKDSTYSLSSTL | EYADETATIVEFLNR |
| | SPGK | TLSKADYEKHKVYACEVTHQGLSSPVTK | WITFAQSIISTLT |
| | (SEQ ID NO: 215) | SFNRGEC (SEQ ID NO: 216) | (SEQ ID NO: 217) |
| EGFR | DILLTQSPVILSVSPGERV | QVQLKQSGPGLVQPSQSLSITCTVSGFS | DIQMTQSPSSLSASV |
| (Cetux)- | SFSCRASQSIGTNIHWYQQ | LTNYGVHWVRQSPGKGLEWLGVIWSGGN | GDRVTITCRASQDIS |
| T25- | RTNGSPRLLIKYASESISG | TDYNTPFTSRLSINKDNSKSQVFFKMNS | NYLNWYQQKPGKAPK |
| NKp46- | IPSRFSGSGSGTDFTLSIN | LQSNDTAIYYCARALTYYDYEFAYWGQG | LLIYYTSRLHSGVPS |
| 1-IL2v | SVESEDIADYYCQQNNNWP | TLVTVSAASTKGPSVFPLAPSSKSTSGG | RFSGSGSGTDFTFTI |
| | TTFGAGTKLELKRTVAAPS | TAALGCLVKDYFPEPVTVSWNSGALTSG | SSLQPEDIATYFCQQ |
| | VFIFPPSDEQLKSGTASVV | VHTFPAVLQSSGLYSLSSVVTVPSSSLG | GNTRPWTFGGGTKVE |
| | CLLNNFYPREAKVQWKVDN | TQTYICNVNHKPSNTKVDKRVEPKSCDK | IKRTVAAPSVFIFPP |
| | ALQSGNSQESVTEQDSKDS | THTCPPCPAPELLGGPSVFLFPPKPKDT | SDEQLKSGTASVVCL |
| | TYSLSSTLTLSKADYEKHK | LMISRTPEVTCVVVDVSHEDPEVKENWY | LNNFYPREAKVQWKV |
| | VYACEVTHQGLSSPVTKSF | VDGVEVHNAKTKPREEQYNSTYRVVSVL | DNALQSGNSQESVTE |
| | NRGECDKTHTCPPCPAPEL | TVLHQDWLNGKEYKCKVSNKALPAPIEK | QDSKDSTYSLSSTLT |
| | LGGPSVFLFPPKPKDTLMI | TISKAKGQPREPQVYTLPPSREEMTKNQ | LSKADYEKHKVYACE |
| | SRTPEVTCVVVDVSHEDPE | VSLTCLVKGFYPSDIAVEWESNGQPENN | VTHQGLSSPVTKSEN |
| | VKFNWYVDGVEVHNAKTKP | YKTTPPVLDSDGSFFLYSKLTVDKSRWQ | RGECGSSSSGSSSSA |
| | REEQYNSTYRVVSVLTVLH | QGNVFSCSVMHEALHNHYTQKSLSLSPG | PASSSTKKTQLQLEH |
| | QDWLNGKEYKCKVSNKALP | STGSQVQLVQSGAEVKKPGSSVKVSCKA | LLLDLQMILNGINNY |
| | APIEKTISKAKGQPREPQV | SGYTFSDYVINWVRQAPGQGLEWMGEIY | KNPKLTRMLTAKFAM |
| | YTLPPSREEMTKNQVSLTC | PGSGTNYYNEKFKAKATITADKSTSTAY | PKKATELKHLQCLEE |
| | LVKGFYPSDIAVEWESNGQ | MELSSLRSEDTAVYYCARRGRYGLYAMD | ELKPLEEVLNGAQSK |
| | PENNYKTTPPVLDSDGSFF | YWGQGTTVTVSSASTKGPSVFPLAPSSK | NFHLRPRDLISNINV |
| | LYSKLTVDKSRWQQGNVFS | STSGGTAALGCLVKDYFPEPVTVSWNSG | IVLELKGSETTFMCE |
| | CSVMHEALHNHYTQKSLSL | ALTSGVHTFPAVLQSSGLYSLSSVVTVP | YADETATIVEFLNRW |
| | SPGK (SEQ ID NO: 218) | SSSLGTQTYICNVNHKPSNTKVDKRVEP | ITFAQSIISTLT |
| | | KSCDKTHS (SEQ ID NO: 219) | (SEQ ID NO: 220) |
| CD20- | DIVMTQTPLSLPVTPGEPA | QVQLVQSGAEVKKPGSSVKVSCKASGYA | DIQMTQSPSSLSASV |
| T5- | SISCRSSKSLLHSNGITYL | FSYSWINWVRQAPGQGLEWMGRIFPGDG | GDRVTITCRASQDIS |
| NKp46- | YWYLQKPGQSPQLLIYQMS | DTDYNGKFKGRVTITADKSTSTAYMELS | NYLNWYQQKPGKAPK |
| IL 15 | NLVSGVPDRFSGSGSGTDF | SLRSEDTAVYYCARNVEDGYWLVYWGQG | LLIYYTSRLHSGVPS |
| | TLKISRVEAEDVGVYYCAQ | TLVTVSSASTKGPSVFPLAPSSKSTSGG | RFSGSGSGTDFTFTI |
| | NLELPYTFGGGTKVEIKRT | TAALGCLVKDYFPEPVTVSWNSGALTSG | SSLQPEDIATYFCQQ |
| | VAAPSVFIFPPSDEQLKSG | VHTFPAVLQSSGLYSLSSVVTVPSSSLG | GNTRPWTFGGGTKVE |
| | TASVVCLLNNFYPREAKVQ | TQTYICNVNHKPSNTKVDKRVEPKSCDK | IKASTKGPSVFPLAP |
| | WKVDNALQSGNSQESVTEQ | THTCPPCPAPELLGGPSVFLFPPKPKDT | SSKSTSGGTAALGCL |
| | DSKDSTYSLSSTLTLSKAD | LMISRTPEVTCVVVDVSHEDPEVKENWY | VKDYFPEPVTVSWNS |
| | YEKHKVYACEVTHQGLSSP | VDGVEVHNAKTKPREEQYNSTYRVVSVL | GALTSGVHTFPAVLQ |
| | VTKSFNRGECDKTHTCPPC | TVLHQDWLNGKEYKCKVSNKALPAPIEK | SSGLYSLSSVVTVPS |
| | PAPELLGGPSVFLFPPKPK | TISKAKGQPREPQVYTLPPSREEMTKNQ | SSLGTQTYICNVNHK |
| | DTLMISRTPEVTCVVVDVS | VSLTCLVKGFYPSDIAVEWESNGQPENN | PSNTKVDKRVEPKSC |
| | HEDPEVKFNWYVDGVEVHN | YKTTPPVLDSDGSFFLYSKLTVDKSRWQ | DKTHSGGGGSGGGGS |
| | AKTKPREEQYNSTYRVVSV | QGNVFSCSVMHEALHNHYTQKSLSLSPG | GGGGSNWVNVISDLK |
| | LTVLHQDWLNGKEYKCKVS | STGSQVQLVQSGAEVKKPGSSVKVSCKA | KIEDLIQSMHIDATL |
| | NKALPAPIEKTISKAKGQP | SGYTFSDYVINWVRQAPGQGLEWMGEIY | YTESDVHPSCKVTAM |
| | REPQVYTLPPSREEMTKNQ | PGSGTNYYNEKFKAKATITADKSTSTAY | KCFLLELQVISLESG |
| | VSLTCLVKGFYPSDIAVEW | MELSSLRSEDTAVYYCARRGRYGLYAMD | DASIHDTVENLIILA |
| | ESNGQPENNYKTTPPVLDS | YWGQGTTVTVSSRTVAAPSVFIFPPSDE | NNSLSSNGNVTESGC |
| | DGSFFLYSKLTVDKSRWQQ | QLKSGTASVVCLLNNFYPREAKVQWKVD | KECEELEEKNIKEFL |
| | GNVFSCSVMHEALHNHYTQ | NALQSGNSQESVTEQDSKDSTYSLSSTL | QSFVHIVQMFINTS |
| | KSLSLSPGK | TLSKADYEKHKVYACEVTHQGLSSPVTK | (SEQ ID NO: 443) |
| | (SEQ ID NO: 441) | SFNRGEC (SEQ ID NO: 442) | |
| CD20- | DIVMTQTPLSLPVTPGEPA | QVQLVQSGAEVKKPGSSVKVSCKASGYA | DIQMTQSPSSLSASV |
| T5- | SISCRSSKSLLHSNGITYL | FSYSWINWVRQAPGQGLEWMGRIFPGDG | GDRVTITCRASQDIS |
| NKp46- | YWYLQKPGQSPQLLIYQMS | DTDYNGKFKGRVTITADKSTSTAYMELS | NYLNWYQQKPGKAPK |
| IL 18v | NLVSGVPDRFSGSGSGTDE | SLRSEDTAVYYCARNVFDGYWLVYWGQG | LLIYYTSRLHSGVPS |
| | TLKISRVEAEDVGVYYCAQ | TLVTVSSASTKGPSVFPLAPSSKSTSGG | RFSGSGSGTDFTFTI |
| | NLELPYTFGGGTKVEIKRT | TAALGCLVKDYFPEPVTVSWNSGALTSG | SSLQPEDIATYFCQQ |
| | VAAPSVFIFPPSDEQLKSG | VHTFPAVLQSSGLYSLSSVVTVPSSSLG | GNTRPWTFGGGTKVE |
| | TASVVCLLNNFYPREAKVQ | TQTYICNVNHKPSNTKVDKRVEPKSCDK | IKASTKGPSVFPLAP |
| | WKVDNALQSGNSQESVTEQ | THTCPPCPAPELLGGPSVFLFPPKPKDT | SSKSTSGGTAALGCL |
| | DSKDSTYSLSSTLTLSKAD | LMISRTPEVTCVVVDVSHEDPEVKENWY | VKDYFPEPVTVSWNS |
| | YEKHKVYACEVTHQGLSSP | VDGVEVHNAKTKPREEQYNSTYRVVSVL | GALTSGVHTFPAVLQ |
| | VTKSENRGECDKTHTCPPC | TVLHQDWLNGKEYKCKVSNKALPAPIEK | SSGLYSLSSVVTVPS |
| | PAPELLGGPSVFLFPPKPK | TISKAKGQPREPQVYTLPPSREEMTKNQ | SSLGTQTYICNVNHK |
| | DTLMISRTPEVTCVVVDVS | VSLTCLVKGFYPSDIAVEWESNGQPENN | PSNTKVDKRVEPKSC |
| | HEDPEVKENWYVDGVEVHN | YKTTPPVLDSDGSFFLYSKLTVDKSRWQ | DKTHSGGSGGGGSGG |
| | AKTKPREEQYNSTYRVVSV | QGNVFSCSVMHEALHNHYTQKSLSLSPG | GGSGGYFGKLESKLS |
| | LTVLHQDWLNGKEYKCKVS | STGSQVQLVQSGAEVKKPGSSVKVSCKA | VIRNLNDQVLFIDQG |
| | NKALPAPIEKTISKAKGQP | SGYTFSDYVINWVRQAPGQGLEWMGEIY | NRPLFEDMTDSDCRD |
| | REPQVYTLPPSREEMTKNQ | PGSGTNYYNEKFKAKATITADKSTSTAY | NAPRTIFIISKYGDS |
| | VSLTCLVKGFYPSDIAVEW | MELSSLRSEDTAVYYCARRGRYGLYAMD | GARGLAVTISVKCEK |
| | ESNGQPENNYKTTPPVLDS | YWGQGTTVTVSSRTVAAPSVFIFPPSDE | ISTLSCENKIISFKE |
| | DGSFFLYSKLTVDKSRWQQ | QLKSGTASVVCLLNNFYPREAKVQWKVD | MNPPDNIKDTKSDII |
| | GNVFSCSVMHEALHNHYTQ | NALQSGNSQESVTEQDSKDSTYSLSSTL | FFERDVPGHSGKVQF |
| | KSLSLSPGK | TLSKADYEKHKVYACEVTHQGLSSPVTK | ESSSYEGYFLACEKE |
| | (SEQ ID NO: 444) | SFNRGEC | RDLFKLILKKEDELG |
| | | (SEQ ID NO: 445) | DRSIMFTVQNED |
| | | | (SEQ ID NO: 446) |
| CD20- | DIVMTQTPLSLPVTPGEPA | QVQLVQSGAEVKKPGSSVKVSCKASGYA | DIQMTQSPSSLSASV |
| T5- | SISCRSSKSLLHSNGITYL | FSYSWINWVRQAPGQGLEWMGRIFPGDG | GDRVTITCRASQDIS |
| NKp46- | YWYLQKPGQSPQLLIYQMS | DTDYNGKFKGRVTITADKSTSTAYMELS | NYLNWYQQKPGKAPK |
| IFNαv | NLVSGVPDRFSGSGSGTDF | SLRSEDTAVYYCARNVFDGYWLVYWGQG | LLIYYTSRLHSGVPS |
| | TLKISRVEAEDVGVYYCAQ | TLVTVSSASTKGPSVFPLAPSSKSTSGG | RFSGSGSGTDFTFTI |
| | NLELPYTFGGGTKVEIKRT | TAALGCLVKDYFPEPVTVSWNSGALTSG | SSLQPEDIATYFCQQ |
| | VAAPSVFIFPPSDEQLKSG | VHTFPAVLQSSGLYSLSSVVTVPSSSLG | GNTRPWTFGGGTKVE |
| | TASVVCLLNNFYPREAKVQ | TQTYICNVNHKPSNTKVDKRVEPKSCDK | IKASTKGPSVFPLAP |
| | WKVDNALQSGNSQESVTEQ | THTCPPCPAPELLGGPSVFLFPPKPKDT | SSKSTSGGTAALGCL |
| | DSKDSTYSLSSTLTLSKAD | LMISRTPEVTCVVVDVSHEDPEVKENWY | VKDYFPEPVTVSWNS |
| | YEKHKVYACEVTHQGLSSP | VDGVEVHNAKTKPREEQYNSTYRVVSVL | GALTSGVHTFPAVLQ |
| | VTKSFNRGECDKTHTCPPC | TVLHQDWLNGKEYKCKVSNKALPAPIEK | SSGLYSLSSVVTVPS |
| | PAPELLGGPSVFLFPPKPK | TISKAKGQPREPQVYTLPPSREEMTKNQ | SSLGTQTYICNVNHK |
| | DTLMISRTPEVTCVVVDVS | VSLTCLVKGFYPSDIAVEWESNGQPENN | PSNTKVDKRVEPKSC |
| | HEDPEVKFNWYVDGVEVHN | YKTTPPVLDSDGSFFLYSKLTVDKSRWQ | DKTHSGGGGSGGGGS |
| | AKTKPREEQYNSTYRVVSV | QGNVFSCSVMHEALHNHYTQKSLSLSPG | GGGGSDLPQTHSLGS |
| | LTVLHQDWLNGKEYKCKVS | STGSQVQLVQSGAEVKKPGSSVKVSCKA | RRTLMLLAQMRRISL |
| | NKALPAPIEKTISKAKGQP | SGYTFSDYVINWVRQAPGQGLEWMGEIY | FSCAKDRHDFGFPQE |
| | REPQVYTLPPSREEMTKNQ | PGSGTNYYNEKFKAKATITADKSTSTAY | EFGNQFQKAETIPVL |
| | VSLTCLVKGFYPSDIAVEW | MELSSLRSEDTAVYYCARRGRYGLYAMD | HEMIQQIFNLFSTKD |
| | ESNGQPENNYKTTPPVLDS | YWGQGTTVTVSSRTVAAPSVFIFPPSDE | SSAAWDETLLDKFYT |
| | DGSFFLYSKLTVDKSRWQQ | QLKSGTASVVCLLNNFYPREAKVQWKVD | ELYQQLNDLEACVIQ |
| | GNVFSCSVMHEALHNHYTQ | NALQSGNSQESVTEQDSKDSTYSLSSTL | GVGVTETPLMKEDSI |
| | KSLSLSPGK | TLSKADYEKHKVYACEVTHQGLSSPVTK | LAVRKYFQRITLYLK |
| | (SEQ ID NO: 447) | SENRGEC | EKKYSPCAWEVVRAE |
| | | (SEQ ID NO: 448) | IMRSFSLSTNLQESL |
| | | | RSKE |
| | | | (SEQ ID NO: 449) |
| IC-T6- | EIVLTQSPATLSLSPGERA | EVQLVESGGGLVQPGRSLRLSCAASGFT | EIVLTQSPGTLSLSP |
| IC-IL2v | TLSCRASQSVRSYLAWYQQ | FDNYAMHWVRQAPGKGLEWVSGISRSSG | GERATLSCRASQSVS |
| | KPGQAPRLLFSDASNRATG | DIDYADSVKGRFTISRDNAKNSLYLQMN | SSYLAWYQQKPGQAP |
| | IPARFSGSGSGTDFTLTIS | SLRAEDTALYYCARGGVGSFDTWGQGTM | RLLIYGASSRATGIP |
| | SLEPEDFAVYYCQQYRYSP | VTVSSASTKGPSVFPLAPSSKSTSGGTA | DRFSGSGSGTDFTLT |
| | RTFGQGTKVEIKRTVAAPS | ALGCLVKDYFPEPVTVSWNSGALTSGVH | ISRLEPEDFAVYYCQ |
| | VFIFPPSDEQLKSGTASVV | TFPAVLQSSGLYSLSSVVTVPSSSLGTQ | QYGSSTWTFGQGTKV |
| | CLLNNFYPREAKVQWKVDN | TYICNVNHKPSNTKVDKRVEPKSCDKTH | EIKASTKGPSVFPLA |
| | ALQSGNSQESVTEQDSKDS | TCPPCPAPELLGGPSVFLFPPKPKDTLM | PSSKSTSGGTAALGC |
| | TYSLSSTLTLSKADYEKHK | ISRTPEVTCVVVDVSHEDPEVKENWYVD | LVKDYFPEPVTVSWN |
| | VYACEVTHQGLSSPVTKSF | GVEVHNAKTKPREEQYSSTYRVVSVLTV | SGALTSGVHTFPAVL |
| | NRGECDKTHTCPPCPAPEL | LHQDWLNGKEYKCKVSNKALPAPIEKTI | QSSGLYSLSSVVTVP |
| | LGGPSVFLFPPKPKDTLMI | SKAKGQPREPQVYTLPPSREEMTKNQVS | SSSLGTQTYICNVNH |
| | SRTPEVTCVVVDVSHEDPE | LTCLVKGFYPSDIAVEWESNGQPENNYK | KPSNTKVDKRVEPKS |
| | VKFNWYVDGVEVHNAKTKP | TTPPVLDSDGSFFLYSKLTVDKSRWQQG | CDKTHSGSSSSGSSS |
| | REEQYSSTYRVVSVLTVLH | NVFSCSVMHEALHNHYTQKSLSLSPGST | SAPASSSTKKTQLQL |
| | QDWLNGKEYKCKVSNKALP | GSEVQLVQSGAEVKKSGESLKISCKGSG | EHLLLDLQMILNGIN |
| | APIEKTISKAKGQPREPQV | YSFTSYWIGWVRQMPGKGLEWMGIFYPG | NYKNPKLTRMLTAKF |
| | YTLPPSREEMTKNQVSLTC | DSSTRYSPSFQGQVTISADKSVNTAYLQ | AMPKKATELKHLQCL |
| | LVKGFYPSDIAVEWESNGQ | WSSLKASDTAMYYCARRRNWGNAFDIWG | EEELKPLEEVLNGAQ |
| | PENNYKTTPPVLDSDGSFF | QGTMVTVSSRTVAAPSVFIFPPSDEQLK | SKNFHLRPRDLISNI |
| | LYSKLTVDKSRWQQGNVFS | SGTASVVCLLNNFYPREAKVQWKVDNAL | NVIVLELKGSETTFM |
| | CSVMHEALHNHYTQKSLSL | QSGNSQESVTEQDSKDSTYSLSSTLTLS | CEYADETATIVEFLN |
| | SPGK | KADYEKHKVYACEVTHQGLSSPVTKSEN | RWITFAQSIISTLT |
| | (SEQ ID NO: 450) | RGEC | (SEQ ID NO: 452) |
| | | (SEQ ID NO: 451) | |
| IC-T6- | EIVLTQSPATLSLSPGERA | EVQLVESGGGLVQPGRSLRLSCAASGFT | EIVLTQSPGTLSLSP |
| IC- | TLSCRASQSVRSYLAWYQQ | FDNYAMHWVRQAPGKGLEWVSGISRSSG | GERATLSCRASQSVS |
| IL2pWT | KPGQAPRLLFSDASNRATG | DIDYADSVKGRFTISRDNAKNSLYLQMN | SSYLAWYQQKPGQAP |
| | IPARFSGSGSGTDFTLTIS | SLRAEDTALYYCARGGVGSFDTWGQGTM | RLLIYGASSRATGIP |
| | SLEPEDFAVYYCQQYRYSP | VTVSSASTKGPSVFPLAPSSKSTSGGTA | DRFSGSGSGTDFTLT |
| | RTFGQGTKVEIKRTVAAPS | ALGCLVKDYFPEPVTVSWNSGALTSGVH | ISRLEPEDFAVYYCQ |
| | VFIFPPSDEQLKSGTASVV | TFPAVLQSSGLYSLSSVVTVPSSSLGTQ | QYGSSTWTFGQGTKV |
| | CLLNNFYPREAKVQWKVDN | TYICNVNHKPSNTKVDKRVEPKSCDKTH | EIKASTKGPSVFPLA |
| | ALQSGNSQESVTEQDSKDS | TCPPCPAPELLGGPSVFLFPPKPKDTLM | PSSKSTSGGTAALGC |
| | TYSLSSTLTLSKADYEKHK | ISRTPEVTCVVVDVSHEDPEVKFNWYVD | LVKDYFPEPVTVSWN |
| | VYACEVTHQGLSSPVTKSF | GVEVHNAKTKPREEQYSSTYRVVSVLTV | SGALTSGVHTFPAVL |
| | NRGECDKTHTCPPCPAPEL | LHQDWLNGKEYKCKVSNKALPAPIEKTI | QSSGLYSLSSVVTVP |
| | LGGPSVFLFPPKPKDTLMI | SKAKGQPREPQVYTLPPSREEMTKNQVS | SSSLGTQTYICNVNH |
| | SRTPEVTCVVVDVSHEDPE | LTCLVKGFYPSDIAVEWESNGQPENNYK | KPSNTKVDKRVEPKS |
| | VKFNWYVDGVEVHNAKTKP | TTPPVLDSDGSFFLYSKLTVDKSRWQQG | CDKTHSGSSSSGSSS |
| | REEQYSSTYRVVSVLTVLH | NVFSCSVMHEALHNHYTQKSLSLSPGST | SGSSSSTKKTQLQLE |
| | QDWLNGKEYKCKVSNKALP | GSEVQLVQSGAEVKKSGESLKISCKGSG | HLLLDLQMILNGINN |
| | APIEKTISKAKGQPREPQV | YSFTSYWIGWVRQMPGKGLEWMGIFYPG | YKNPKLTRMLTFKFY |
| | YTLPPSREEMTKNQVSLTC | DSSTRYSPSFQGQVTISADKSVNTAYLQ | MPKKATELKHLQCLE |
| | LVKGFYPSDIAVEWESNGQ | WSSLKASDTAMYYCARRRNWGNAFDIWG | EELKPLEEVLNLAQS |
| | PENNYKTTPPVLDSDGSFF | QGTMVTVSSRTVAAPSVFIFPPSDEQLK | KNFHLRPRDLISNIN |
| | LYSKLTVDKSRWQQGNVES | SGTASVVCLLNNFYPREAKVQWKVDNAL | VIVLELKGSETTFMC |
| | CSVMHEALHNHYTQKSLSL | QSGNSQESVTEQDSKDSTYSLSSTLTLS | EYADETATIVEFLNR |
| | SPGK | KADYEKHKVYACEVTHQGLSSPVTKSEN | WITFCQSIISTLT |
| | (SEQ ID NO: 453) | RGEC | (SEQ ID NO: 455) |
| | | (SEQ ID NO: 454) | |
| CD20- | DIVMTQTPLSLPVTPGEPA | QVQLVQSGAEVKKPGSSVKVSCKASGYA | EIVLTQSPGTLSLSP |
| T6-IC- | SISCRSSKSLLHSNGITYL | FSYSWINWVRQAPGQGLEWMGRIFPGDG | GERATLSCRASQSVS |
| IL2v | YWYLQKPGQSPQLLIYQMS | DTDYNGKFKGRVTITADKSTSTAYMELS | SSYLAWYQQKPGQAP |
| | NLVSGVPDRFSGSGSGTDF | SLRSEDTAVYYCARNVEDGYWLVYWGQG | RLLIYGASSRATGIP |
| | TLKISRVEAEDVGVYYCAQ | TLVTVSSASTKGPSVFPLAPSSKSTSGG | DRFSGSGSGTDFTLT |
| | NLELPYTFGGGTKVEIKRT | TAALGCLVKDYFPEPVTVSWNSGALTSG | ISRLEPEDFAVYYCQ |
| | VAAPSVFIFPPSDEQLKSG | VHTFPAVLQSSGLYSLSSVVTVPSSSLG | QYGSSTWTFGQGTKV |
| | TASVVCLLNNFYPREAKVQ | TQTYICNVNHKPSNTKVDKRVEPKSCDK | EIKASTKGPSVFPLA |
| | WKVDNALQSGNSQESVTEQ | THTCPPCPAPELLGGPSVFLFPPKPKDT | PSSKSTSGGTAALGC |
| | DSKDSTYSLSSTLTLSKAD | LMISRTPEVTCVVVDVSHEDPEVKENWY | LVKDYFPEPVTVSWN |
| | YEKHKVYACEVTHQGLSSP | VDGVEVHNAKTKPREEQYSSTYRVVSVL | SGALTSGVHTFPAVL |
| | VTKSFNRGECDKTHTCPPC | TVLHQDWLNGKEYKCKVSNKALPAPIEK | QSSGLYSLSSVVTVP |
| | PAPELLGGPSVFLFPPKPK | TISKAKGQPREPQVYTLPPSREEMTKNQ | SSSLGTQTYICNVNH |
| | DTLMISRTPEVTCVVVDVS | VSLTCLVKGFYPSDIAVEWESNGQPENN | KPSNTKVDKRVEPKS |
| | HEDPEVKFNWYVDGVEVHN | YKTTPPVLDSDGSFFLYSKLTVDKSRWQ | CDKTHSGSSSSGSSS |
| | AKTKPREEQYSSTYRVVSV | QGNVFSCSVMHEALHNHYTQKSLSLSPG | SAPASSSTKKTQLQL |
| | LTVLHQDWLNGKEYKCKVS | STGSEVQLVQSGAEVKKSGESLKISCKG | EHLLLDLQMILNGIN |
| | NKALPAPIEKTISKAKGQP | SGYSFTSYWIGWVRQMPGKGLEWMGIFY | NYKNPKLTRMLTAKF |
| | REPQVYTLPPSREEMTKNQ | PGDSSTRYSPSFQGQVTISADKSVNTAY | AMPKKATELKHLQCL |
| | VSLTCLVKGFYPSDIAVEW | LQWSSLKASDTAMYYCARRRNWGNAFDI | EEELKPLEEVLNGAQ |
| | ESNGQPENNYKTTPPVLDS | WGQGTMVTVSSRTVAAPSVFIFPPSDEQ | SKNFHLRPRDLISNI |
| | DGSFFLYSKLTVDKSRWQQ | LKSGTASVVCLLNNFYPREAKVQWKVDN | NVIVLELKGSETTEM |
| | GNVFSCSVMHEALHNHYTQ | ALQSGNSQESVTEQDSKDSTYSLSSTLT | CEYADETATIVEFLN |
| | KSLSLSPGK | LSKADYEKHKVYACEVTHQGLSSPVTKS | RWITFAQSIISTLT |
| | (SEQ ID NO: 456) | FNRGEC | (SEQ ID NO: 458) |
| | | (SEQ ID NO: 457) | |
| CD20- | DIVMTQTPLSLPVTPGEPA | QVQLVQSGAEVKKPGSSVKVSCKASGYA | EIVLTQSPGTLSLSP |
| T5-IC- | SISCRSSKSLLHSNGITYL | FSYSWINWVRQAPGQGLEWMGRIFPGDG | GERATLSCRASQSVS |
| IL2v | YWYLQKPGQSPQLLIYQMS | DTDYNGKFKGRVTITADKSTSTAYMELS | SSYLAWYQQKPGQAP |
| | NLVSGVPDRFSGSGSGTDF | SLRSEDTAVYYCARNVFDGYWLVYWGQG | RLLIYGASSRATGIP |
| | TLKISRVEAEDVGVYYCAQ | TLVTVSSASTKGPSVFPLAPSSKSTSGG | DRESGSGSGTDFTLT |
| | NLELPYTFGGGTKVEIKRT | TAALGCLVKDYFPEPVTVSWNSGALTSG | ISRLEPEDFAVYYCQ |
| | VAAPSVFIFPPSDEQLKSG | VHTFPAVLQSSGLYSLSSVVTVPSSSLG | QYGSSTWTFGQGTKV |
| | TASVVCLLNNFYPREAKVQ | TQTYICNVNHKPSNTKVDKRVEPKSCDK | EIKASTKGPSVFPLA |
| | WKVDNALQSGNSQESVTEQ | THTCPPCPAPELLGGPSVFLFPPKPKDT | PSSKSTSGGTAALGC |
| | DSKDSTYSLSSTLTLSKAD | LMISRTPEVTCVVVDVSHEDPEVKENWY | LVKDYFPEPVTVSWN |
| | YEKHKVYACEVTHQGLSSP | VDGVEVHNAKTKPREEQYNSTYRVVSVL | SGALTSGVHTFPAVL |
| | VTKSFNRGECDKTHTCPPC | TVLHQDWLNGKEYKCKVSNKALPAPIEK | QSSGLYSLSSVVTVP |
| | PAPELLGGPSVFLFPPKPK | TISKAKGQPREPQVYTLPPSREEMTKNQ | SSSLGTQTYICNVNH |
| | DTLMISRTPEVTCVVVDVS | VSLTCLVKGFYPSDIAVEWESNGQPENN | KPSNTKVDKRVEPKS |
| | HEDPEVKENWYVDGVEVHN | YKTTPPVLDSDGSFFLYSKLTVDKSRWQ | CDKTHSGSSSSGSSS |
| | AKTKPREEQYNSTYRVVSV | QGNVFSCSVMHEALHNHYTQKSLSLSPG | SAPASSSTKKTQLQL |
| | LTVLHQDWLNGKEYKCKVS | STGSEVQLVQSGAEVKKSGESLKISCKG | EHLLLDLQMILNGIN |
| | NKALPAPIEKTISKAKGQP | SGYSFTSYWIGWVRQMPGKGLEWMGIFY | NYKNPKLTRMLTAKF |
| | REPQVYTLPPSREEMTKNQ | PGDSSTRYSPSFQGQVTISADKSVNTAY | AMPKKATELKHLQCL |
| | VSLTCLVKGFYPSDIAVEW | LQWSSLKASDTAMYYCARRRNWGNAFDI | EEELKPLEEVLNGAQ |
| | ESNGQPENNYKTTPPVLDS | WGQGTMVTVSSRTVAAPSVFIFPPSDEQ | SKNFHLRPRDLISNI |
| | DGSFFLYSKLTVDKSRWQQ | LKSGTASVVCLLNNFYPREAKVQWKVDN | NVIVLELKGSETTFM |
| | GNVFSCSVMHEALHNHYTQ | ALQSGNSQESVTEQDSKDSTYSLSSTLT | CEYADETATIVEFLN |
| | KSLSLSPGK | LSKADYEKHKVYACEVTHQGLSSPVTKS | RWITFAQSIISTLT |
| | (SEQ ID NO: 459) | FNRGEC | (SEQ ID NO: 461) |
| | | (SEQ ID NO: 460) | |
| CD20- | DIVMTQTPLSLPVTPGEPA | QVQLVQSGAEVKKPGSSVKVSCKASGYA | DIQMTQSPSSLSASV |
| T6- | SISCRSSKSLLHSNGITYL | FSYSWINWVRQAPGQGLEWMGRIFPGDG | GDRVTITCRASQDIS |
| NKp46- | YWYLQKPGQSPQLLIYQMS | DTDYNGKFKGRVTITADKSTSTAYMELS | NYLNWYQQKPGKAPK |
| IL2v | NLVSGVPDRFSGSGSGTDF | SLRSEDTAVYYCARNVFDGYWLVYWGQG | LLIYYTSRLHSGVPS |
| | TLKISRVEAEDVGVYYCAQ | TLVTVSSASTKGPSVFPLAPSSKSTSGG | RFSGSGSGTDFTFTI |
| | NLELPYTFGGGTKVEIKRT | TAALGCLVKDYFPEPVTVSWNSGALTSG | SSLQPEDIATYFCQQ |
| | VAAPSVFIFPPSDEQLKSG | VHTFPAVLQSSGLYSLSSVVTVPSSSLG | GNTRPWTFGGGTKVE |
| | TASVVCLLNNFYPREAKVQ | TQTYICNVNHKPSNTKVDKRVEPKSCDK | IKASTKGPSVFPLAP |
| | WKVDNALQSGNSQESVTEQ | THTCPPCPAPELLGGPSVFLFPPKPKDT | SSKSTSGGTAALGCL |
| | DSKDSTYSLSSTLTLSKAD | LMISRTPEVTCVVVDVSHEDPEVKENWY | VKDYFPEPVTVSWNS |
| | YEKHKVYACEVTHQGLSSP | VDGVEVHNAKTKPREEQYSSTYRVVSVL | GALTSGVHTFPAVLQ |
| | VTKSFNRGECDKTHTCPPC | TVLHQDWLNGKEYKCKVSNKALPAPIEK | SSGLYSLSSVVTVPS |
| | PAPELLGGPSVFLFPPKPK | TISKAKGQPREPQVYTLPPSREEMTKNQ | SSLGTQTYICNVNHK |
| | DTLMISRTPEVTCVVVDVS | VSLTCLVKGFYPSDIAVEWESNGQPENN | PSNTKVDKRVEPKSC |
| | HEDPEVKFNWYVDGVEVHN | YKTTPPVLDSDGSFFLYSKLTVDKSRWQ | DKTHSGSSSSGSSSS |
| | AKTKPREEQYSSTYRVVSV | QGNVFSCSVMHEALHNHYTQKSLSLSPG | APASSSTKKTQLQLE |
| | LTVLHQDWLNGKEYKCKVS | STGSQVQLVQSGAEVKKPGSSVKVSCKA | HLLLDLQMILNGINN |
| | NKALPAPIEKTISKAKGQP | SGYTFSDYVINWVRQAPGQGLEWMGEIY | YKNPKLTRMLTAKFA |
| | REPQVYTLPPSREEMTKNQ | PGSGTNYYNEKFKAKATITADKSTSTAY | MPKKATELKHLQCLE |
| | VSLTCLVKGFYPSDIAVEW | MELSSLRSEDTAVYYCARRGRYGLYAMD | EELKPLEEVLNGAQS |
| | ESNGQPENNYKTTPPVLDS | YWGQGTTVTVSSRTVAAPSVFIFPPSDE | KNFHLRPRDLISNIN |
| | DGSFFLYSKLTVDKSRWQQ | QLKSGTASVVCLLNNFYPREAKVQWKVD | VIVLELKGSETTFMC |
| | GNVFSCSVMHEALHNHYTQ | NALQSGNSQESVTEQDSKDSTYSLSSTL | EYADETATIVEFLNR |
| | KSLSLSPGK | TLSKADYEKHKVYACEVTHQGLSSPVTK | WITFAQSIISTLT |
| | (SEQ ID NO: 462) | SFNRGEC | (SEQ ID NO: 464) |
| | | (SEQ ID NO: 463) | |
| CD20- | DIVMTQTPLSLPVTPGEPA | QVQLVQSGAEVKKPGSSVKVSCKASGYA | DIQMTQSPSSLSASV |
| F5- | SISCRSSKSLLHSNGITYL | FSYSWINWVRQAPGQGLEWMGRIFPGDG | GDRVTITCRASQDIS |
| NKp46 | YWYLQKPGQSPQLLIYQMS | DTDYNGKFKGRVTITADKSTSTAYMELS | NYLNWYQQKPGKAPK |
| | NLVSGVPDRESGSGSGTDF | SLRSEDTAVYYCARNVFDGYWLVYWGQG | LLIYYTSRLHSGVPS |
| | TLKISRVEAEDVGVYYCAQ | TLVTVSSASTKGPSVFPLAPSSKSTSGG | RFSGSGSGTDFTFTI |
| | NLELPYTFGGGTKVEIKRT | TAALGCLVKDYFPEPVTVSWNSGALTSG | SSLQPEDIATYFCQQ |
| | VAAPSVFIFPPSDEQLKSG | VHTFPAVLQSSGLYSLSSVVTVPSSSLG | GNTRPWTFGGGTKVE |
| | TASVVCLLNNFYPREAKVQ | TQTYICNVNHKPSNTKVDKRVEPKSCDK | IKASTKGPSVFPLAP |
| | WKVDNALQSGNSQESVTEQ | THTCPPCPAPELLGGPSVFLFPPKPKDT | SSKSTSGGTAALGCL |
| | DSKDSTYSLSSTLTLSKAD | LMISRTPEVTCVVVDVSHEDPEVKENWY | VKDYFPEPVTVSWNS |
| | YEKHKVYACEVTHQGLSSP | VDGVEVHNAKTKPREEQYNSTYRVVSVL | GALTSGVHTFPAVLQ |
| | VTKSFNRGECDKTHTCPPC | TVLHQDWLNGKEYKCKVSNKALPAPIEK | SSGLYSLSSVVTVPS |
| | PAPELLGGPSVFLFPPKPK | TISKAKGQPREPQVYTLPPSREEMTKNQ | SSLGTQTYICNVNHK |
| | DTLMISRTPEVTCVVVDVS | VSLTCLVKGFYPSDIAVEWESNGQPENN | PSNTKVDKRVEPKSC |
| | HEDPEVKFNWYVDGVEVHN | YKTTPPVLDSDGSFFLYSKLTVDKSRWQ | DKTHS |
| | AKTKPREEQYNSTYRVVSV | QGNVFSCSVMHEALHNHYTQKSLSLSPG | (SEQ ID NO: 467) |
| | LTVLHQDWLNGKEYKCKVS | STGSQVQLVQSGAEVKKPGSSVKVSCKA | |
| | NKALPAPIEKTISKAKGQP | SGYTFSDYVINWVRQAPGQGLEWMGEIY | |
| | REPQVYTLPPSREEMTKNQ | PGSGTNYYNEKFKAKATITADKSTSTAY | |
| | VSLTCLVKGFYPSDIAVEW | MELSSLRSEDTAVYYCARRGRYGLYAMD | |
| | ESNGQPENNYKTTPPVLDS | YWGQGTTVTVSSRTVAAPSVFIFPPSDE | |
| | DGSFFLYSKLTVDKSRWQQ | QLKSGTASVVCLLNNFYPREAKVQWKVD | |
| | GNVFSCSVMHEALHNHYTQ | NALQSGNSQESVTEQDSKDSTYSLSSTL | |
| | KSLSLSPGK | TLSKADYEKHKVYACEVTHQGLSSPVTK | |
| | (SEQ ID NO: 465) | SFNRGEC | |
| | | (SEQ ID NO: 466) | |
| CD20- | DIVMTQTPLSLPVTPGEPA | QVQLVQSGAEVKKPGSSVKVSCKASGYA | DIQMTQSPSSLSASV |
| F25- | SISCRSSKSLLHSNGITYL | FSYSWINWVRQAPGQGLEWMGRIFPGDG | GDRVTITCRASQDIS |
| NKp46 | YWYLQKPGQSPQLLIYQMS | DTDYNGKFKGRVTITADKSTSTAYMELS | NYLNWYQQKPGKAPK |
| | NLVSGVPDRFSGSGSGTDF | SLRSEDTAVYYCARNVFDGYWLVYWGQG | LLIYYTSRLHSGVPS |
| | TLKISRVEAEDVGVYYCAQ | TLVTVSSASTKGPSVFPLAPSSKSTSGG | RFSGSGSGTDFTFTI |
| | NLELPYTFGGGTKVEIKRT | TAALGCLVKDYFPEPVTVSWNSGALTSG | SSLQPEDIATYFCQQ |
| | VAAPSVFIFPPSDEQLKSG | VHTFPAVLQSSGLYSLSSVVTVPSSSLG | GNTRPWTFGGGTKVE |
| | TASVVCLLNNFYPREAKVQ | TQTYICNVNHKPSNTKVDKRVEPKSCDK | IKRTVAAPSVFIFPP |
| | WKVDNALQSGNSQESVTEQ | THTCPPCPAPELLGGPSVFLFPPKPKDT | SDEQLKSGTASVVCL |
| | DSKDSTYSLSSTLTLSKAD | LMISRTPEVTCVVVDVSHEDPEVKENWY | LNNFYPREAKVQWKV |
| | YEKHKVYACEVTHQGLSSP | VDGVEVHNAKTKPREEQYNSTYRVVSVL | DNALQSGNSQESVTE |
| | VTKSENRGECDKTHTCPPC | TVLHQDWLNGKEYKCKVSNKALPAPIEK | QDSKDSTYSLSSTLT |
| | PAPELLGGPSVFLFPPKPK | TISKAKGQPREPQVYTLPPSREEMTKNQ | LSKADYEKHKVYACE |
| | DTLMISRTPEVTCVVVDVS | VSLTCLVKGFYPSDIAVEWESNGQPENN | VTHQGLSSPVTKSEN |
| | HEDPEVKFNWYVDGVEVHN | YKTTPPVLDSDGSFFLYSKLTVDKSRWQ | RGEC |
| | AKTKPREEQYNSTYRVVSV | QGNVFSCSVMHEALHNHYTQKSLSLSPG | (SEQ ID NO: 470) |
| | LTVLHQDWLNGKEYKCKVS | STGSQVQLVQSGAEVKKPGSSVKVSCKA | |
| | NKALPAPIEKTISKAKGQP | SGYTFSDYVINWVRQAPGQGLEWMGEIY | |
| | REPQVYTLPPSREEMTKNQ | PGSGTNYYNEKFKAKATITADKSTSTAY | |
| | VSLTCLVKGFYPSDIAVEW | MELSSLRSEDTAVYYCARRGRYGLYAMD | |
| | ESNGQPENNYKTTPPVLDS | YWGQGTTVTVSSASTKGPSVFPLAPSSK | |
| | DGSFFLYSKLTVDKSRWQQ | STSGGTAALGCLVKDYFPEPVTVSWNSG | |
| | GNVFSCSVMHEALHNHYTQ | ALTSGVHTFPAVLQSSGLYSLSSVVTVP | |
| | KSLSLSPGK | SSSLGTQTYICNVNHKPSNTKVDKRVEP | |
| | (SEQ ID NO: 468) | KSCDKTHS | |
| | | (SEQ ID NO: 469) | |
| IC-T5- | EIVLTQSPATLSLSPGERA | EVQLVESGGGLVQPGRSLRLSCAASGFT | DIQMTQSPSSLSASV |
| NKp46- | TLSCRASQSVRSYLAWYQQ | FDNYAMHWVRQAPGKGLEWVSGISRSSG | GDRVTITCRASQDIS |
| IL2v | KPGQAPRLLFSDASNRATG | DIDYADSVKGRFTISRDNAKNSLYLQMN | NYLNWYQQKPGKAPK |
| | IPARFSGSGSGTDFTLTIS | SLRAEDTALYYCARGGVGSFDTWGQGTM | LLIYYTSRLHSGVPS |
| | SLEPEDFAVYYCQQYRYSP | VTVSSASTKGPSVFPLAPSSKSTSGGTA | RFSGSGSGTDFTFTI |
| | RTFGQGTKVEIKRTVAAPS | ALGCLVKDYFPEPVTVSWNSGALTSGVH | SSLQPEDIATYFCQQ |
| | VFIFPPSDEQLKSGTASVV | TFPAVLQSSGLYSLSSVVTVPSSSLGTQ | GNTRPWTFGGGTKVE |
| | CLLNNFYPREAKVQWKVDN | TYICNVNHKPSNTKVDKRVEPKSCDKTH | IKASTKGPSVFPLAP |
| | ALQSGNSQESVTEQDSKDS | TCPPCPAPELLGGPSVFLFPPKPKDTLM | SSKSTSGGTAALGCL |
| | TYSLSSTLTLSKADYEKHK | ISRTPEVTCVVVDVSHEDPEVKENWYVD | VKDYFPEPVTVSWNS |
| | VYACEVTHQGLSSPVTKSF | GVEVHNAKTKPREEQYNSTYRVVSVLTV | GALTSGVHTFPAVLQ |
| | NRGECDKTHTCPPCPAPEL | LHQDWLNGKEYKCKVSNKALPAPIEKTI | SSGLYSLSSVVTVPS |
| | LGGPSVFLFPPKPKDTLMI | SKAKGQPREPQVYTLPPSREEMTKNQVS | SSLGTQTYICNVNHK |
| | SRTPEVTCVVVDVSHEDPE | LTCLVKGFYPSDIAVEWESNGQPENNYK | PSNTKVDKRVEPKSC |
| | VKFNWYVDGVEVHNAKTKP | TTPPVLDSDGSFFLYSKLTVDKSRWQQG | DKTHSGSSSSGSSSS |
| | REEQYNSTYRVVSVLTVLH | NVFSCSVMHEALHNHYTQKSLSLSPGST | APASSSTKKTQLQLE |
| | QDWLNGKEYKCKVSNKALP | GSQVQLVQSGAEVKKPGSSVKVSCKASG | HLLLDLQMILNGINN |
| | APIEKTISKAKGQPREPQV | YTFSDYVINWVRQAPGQGLEWMGEIYPG | YKNPKLTRMLTAKFA |
| | YTLPPSREEMTKNQVSLTC | SGTNYYNEKFKAKATITADKSTSTAYME | MPKKATELKHLQCLE |
| | LVKGFYPSDIAVEWESNGQ | LSSLRSEDTAVYYCARRGRYGLYAMDYW | EELKPLEEVLNGAQS |
| | PENNYKTTPPVLDSDGSFF | GQGTTVTVSSRTVAAPSVFIFPPSDEQL | KNFHLRPRDLISNIN |
| | LYSKLTVDKSRWQQGNVES | KSGTASVVCLLNNFYPREAKVQWKVDNA | VIVLELKGSETTFMC |
| | CSVMHEALHNHYTQKSLSL | LQSGNSQESVTEQDSKDSTYSLSSTLTL | EYADETATIVEFLNR |
| | SPGK | SKADYEKHKVYACEVTHQGLSSPVTKSF | WITFAQSIISTLT |
| | (SEQ ID NO: 471) | NRGEC | (SEQ ID NO: 473) |
| | | (SEQ ID NO: 472) | |
| CD20- | DIVMTQTPLSLPVTPGEPA | QVQLVQSGAEVKKPGSSVKVSCKASGYA | EIVLTQSPGTLSLSP |
| T5-IC- | SISCRSSKSLLHSNGITYL | FSYSWINWVRQAPGQGLEWMGRIFPGDG | GERATLSCRASQSVS |
| IL2v3 | YWYLQKPGQSPQLLIYQMS | DTDYNGKFKGRVTITADKSTSTAYMELS | SSYLAWYQQKPGQAP |
| | NLVSGVPDRFSGSGSGTDF | SLRSEDTAVYYCARNVFDGYWLVYWGQG | RLLIYGASSRATGIP |
| | TLKISRVEAEDVGVYYCAQ | TLVTVSSASTKGPSVFPLAPSSKSTSGG | DRFSGSGSGTDFTLT |
| | NLELPYTFGGGTKVEIKRT | TAALGCLVKDYFPEPVTVSWNSGALTSG | ISRLEPEDFAVYYCQ |
| | VAAPSVFIFPPSDEQLKSG | VHTFPAVLQSSGLYSLSSVVTVPSSSLG | QYGSSTWTFGQGTKV |
| | TASVVCLLNNFYPREAKVQ | TQTYICNVNHKPSNTKVDKRVEPKSCDK | EIKASTKGPSVFPLA |
| | WKVDNALQSGNSQESVTEQ | THTCPPCPAPELLGGPSVFLFPPKPKDT | PSSKSTSGGTAALGC |
| | DSKDSTYSLSSTLTLSKAD | LMISRTPEVTCVVVDVSHEDPEVKENWY | LVKDYFPEPVTVSWN |
| | YEKHKVYACEVTHQGLSSP | VDGVEVHNAKTKPREEQYNSTYRVVSVL | SGALTSGVHTFPAVL |
| | VTKSFNRGECDKTHTCPPC | TVLHQDWLNGKEYKCKVSNKALPAPIEK | QSSGLYSLSSVVTVP |
| | PAPELLGGPSVFLFPPKPK | TISKAKGQPREPQVYTLPPSREEMTKNQ | SSSLGTQTYICNVNH |
| | DTLMISRTPEVTCVVVDVS | VSLTCLVKGFYPSDIAVEWESNGQPENN | KPSNTKVDKRVEPKS |
| | HEDPEVKFNWYVDGVEVHN | YKTTPPVLDSDGSFFLYSKLTVDKSRWQ | CDKTHSGSSSSGSSS |
| | AKTKPREEQYNSTYRVVSV | QGNVFSCSVMHEALHNHYTQKSLSLSPG | SGSSSSTKKTQLQLE |
| | LTVLHQDWLNGKEYKCKVS | STGSEVQLVQSGAEVKKSGESLKISCKG | HLLLDLQMILNGINN |
| | NKALPAPIEKTISKAKGQP | SGYSFTSYWIGWVRQMPGKGLEWMGIFY | YKNPKLTAMLAKKFY |
| | REPQVYTLPPSREEMTKNQ | PGDSSTRYSPSFQGQVTISADKSVNTAY | MPKKATELKHLQCLE |
| | VSLTCLVKGFYPSDIAVEW | LQWSSLKASDTAMYYCARRRNWGNAFDI | EELKPLEEVLNLAQS |
| | ESNGQPENNYKTTPPVLDS | WGQGTMVTVSSRTVAAPSVFIFPPSDEQ | KNFHLRPRDLISNIN |
| | DGSFFLYSKLTVDKSRWQQ | LKSGTASVVCLLNNFYPREAKVQWKVDN | VIVLELKGSETTFMC |
| | GNVFSCSVMHEALHNHYTQ | ALQSGNSQESVTEQDSKDSTYSLSSTLT | EYADETATIVEFLNR |
| | KSLSLSPGK | LSKADYEKHKVYACEVTHQGLSSPVTKS | WITFCQSIISTLT |
| | (SEQ ID NO: 474) | FNRGEC | (SEQ ID NO: 476) |
| | | (SEQ ID NO: 475) | |
| CD20- | DIVMTQTPLSLPVTPGEPA | QVQLVQSGAEVKKPGSSVKVSCKASGYA | DIQMTQSPSSLSASV |
| T5A- | SISCRSSKSLLHSNGITYL | FSYSWINWVRQAPGQGLEWMGRIFPGDG | GDRVTITCRASQDIS |
| NKp46- | YWYLQKPGQSPQLLIYQMS | DTDYNGKFKGRVTITADKSTSTAYMELS | NYLNWYQQKPGKAPK |
| IL 15 | NLVSGVPDRFSGSGSGTDF | SLRSEDTAVYYCARNVFDGYWLVYWGQG | LLIYYTSRLHSGVPS |
| | TLKISRVEAEDVGVYYCAQ | TLVTVSSASTKGPSVFPLAPSSKSTSGG | RFSGSGSGTDFTFTI |
| | NLELPYTFGGGTKVEIKRT | TAALGCLVKDYFPEPVTVSWNSGALTSG | SSLQPEDIATYFCQQ |
| | VAAPSVFIFPPSDEQLKSG | VHTFPAVLQSSGLYSLSSVVTVPSSSLG | GNTRPWTFGGGTKVE |
| | TASVVCLLNNFYPREAKVQ | TQTYICNVNHKPSNTKVDKRVEPKSCDK | IKASTKGPSVFPLAP |
| | WKVDNALQSGNSQESVTEQ | THTCPPCPAPELLGGPSVFLFPPKPKDT | SSKSTSGGTAALGCL |
| | DSKDSTYSLSSTLTLSKAD | LMISRTPEVTCVVVDVSHEDPEVKENWY | VKDYFPEPVTVSWNS |
| | YEKHKVYACEVTHQGLSSP | VDGVEVHNAKTKPREEQYNSTYRVVSVL | GALTSGVHTFPAVLQ |
| | VTKSFNRGECDKTHTCPPC | TVLHQDWLNGKEYKCKVSNKALPAPIEK | SSGLYSLSSVVTVPS |
| | PAPELLGGPSVFLFPPKPK | TISKAKGQPREPQVYTLPPSREEMTKNQ | SSLGTQTYICNVNHK |
| | DTLMISRTPEVTCVVVDVS | VSLTCLVKGFYPSDIAVEWESNGQPENN | PSNTKVDKRVEPKSC |
| | HEDPEVKFNWYVDGVEVHN | YKTTPPVLDSDGSFFLYSKLTVDKSRWQ | DKTHSGGGGSGGGGS |
| | AKTKPREEQYNSTYRVVSV | QGNVFSCSVMHEALHNHYTQKSLSLSPG | GGGGSNWVNVISDLK |
| | LTVLHQDWLNGKEYKCKVS | STGSQVQLVQSGAEVKKPGSSVKVSCKA | KIEDLIQSMHIDATL |
| | NKALPAPIEKTISKAKGQP | SGYTFSDYVINWVRQAPGQGLEWMGEIY | YTESDVHPSCKVTAM |
| | REPQVYTLPPSREEMTKNQ | PGSGTNYYNEKFKAKATITADKSTSTAY | KCFLLELQVISLESG |
| | VSLTCLVKGFYPSDIAVEW | MELSSLRSEDTAVYYCARRGRYGLYAMD | DASIHDTVENLIILA |
| | ESNGQPENNYKTTPPVLDS | YWGQGTTVTVSSRTVAAPSVFIFPPSDE | NNSLSSNGNVTESGC |
| | DGSFFLYSKLTVDKSRWQQ | QLKSGTASVVCLLNNFYPREAKVQWKVD | KECEELEEKNIKEFL |
| | GNVFSCSVMHEALHNRFTQ | NALQSGNSQESVTEQDSKDSTYSLSSTL | QSFVHIVQMFINTS |
| | KSLSLSPGK | TLSKADYEKHKVYACEVTHQGLSSPVTK | (SEQ ID NO: 479) |
| | (SEQ ID NO: 477) | SENRGEC | |
| | | (SEQ ID NO: 478) | |
| CD20- | DIVMTQTPLSLPVTPGEPA | QVQLVQSGAEVKKPGSSVKVSCKASGYA | EIVLTQSPGTLSLSP |
| T6AB3- | SISCRSSKSLLHSNGITYL | FSYSWINWVRQAPGQGLEWMGRIFPGDG | GERATLSCRASQSVS |
| IC-IL15 | YWYLQKPGQSPQLLIYQMS | DTDYNGKFKGRVTITADKSTSTAYMELS | SSYLAWYQQKPGQAP |
| | NLVSGVPDRFSGSGSGTDF | SLRSEDTAVYYCARNVFDGYWLVYWGQG | RLLIYGASSRATGIP |
| | TLKISRVEAEDVGVYYCAQ | TLVTVSSASTKGPSVFPLAPSSKSTSGG | DRFSGSGSGTDFTLT |
| | NLELPYTFGGGTKVEIKRT | TAALGCLVKDYFPEPVTVSWNSGALTSG | ISRLEPEDFAVYYCQ |
| | VAAPSVFIFPPSDEQLKSG | VHTFPAVLQSSGLYSLSSVVTVPSSSLG | QYGSSTWTFGQGTKV |
| | TASVVCLLNNFYPREAKVQ | TQTYICNVNHKPSNTKVDKRVEPKSCDK | EIKASTKGPSVFPLA |
| | WKVDNALQSGNSQESVTEQ | THTCPPCPAPEAEGAPSVELFPPKPKDT | PSSKSTSGGTAALGC |
| | DSKDSTYSLSSTLTLSKAD | LMISRTPEVTCVVVDVSHEDPEVKENWY | LVKDYFPEPVTVSWN |
| | YEKHKVYACEVTHQGLSSP | VDGVEVHNAKTKPREEQYNSTYRVVSVL | SGALTSGVHTFPAVL |
| | VTKSFNRGECDKTHTCPPC | TVLHQDWLNGKEYKCKVSNKALPSSIEK | QSSGLYSLSSVVTVP |
| | PAPEAEGAPSVFLFPPKPK | TISKAKGQPREPQVYTLPPSREEMTKNQ | SSSLGTQTYICNVNH |
| | DTLMISRTPEVTCVVVDVS | VSLTCLVKGFYPSDIAVEWESNGQPENN | KPSNTKVDKRVEPKS |
| | HEDPEVKFNWYVDGVEVHN | YKTTPPVLDSDGSFFLYSKLTVDKSRWQ | CDKTHSGGGGSGGGG |
| | AKTKPREEQYNSTYRVVSV | QGNVFSCSVMHEALHNHYTQKSLSLSPG | SGGGGSNWVNVISDL |
| | LTVLHQDWLNGKEYKCKVS | STGSEVQLVQSGAEVKKSGESLKISCKG | KKIEDLIQSMHIDAT |
| | NKALPSSIEKTISKAKGQP | SGYSFTSYWIGWVRQMPGKGLEWMGIFY | LYTESDVHPSCKVTA |
| | REPQVYTLPPSREEMTKNQ | PGDSSTRYSPSFQGQVTISADKSVNTAY | MKCFLLELQVISLES |
| | VSLTCLVKGFYPSDIAVEW | LQWSSLKASDTAMYYCARRRNWGNAFDI | GDASIHDTVENLIIL |
| | ESNGQPENNYKTTPPVLDS | WGQGTMVTVSSRTVAAPSVFIFPPSDEQ | ANNSLSSNGNVTESG |
| | DGSFFLYSKLTVDKSRWQQ | LKSGTASVVCLLNNFYPREAKVQWKVDN | CKECEELEEKNIKEF |
| | GNVFSCSVMHEALHNRFTQ | ALQSGNSQESVTEQDSKDSTYSLSSTLT | LQSFVHIVQMFINTS |
| | KSLSLSPGK | LSKADYEKHKVYACEVTHQGLSSPVTKS | (SEQ ID NO: 482) |
| | (SEQ ID NO: 480) | FNRGEC | |
| | | (SEQ ID NO: 481) | |
| IC-T5A- | EIVLTQSPATLSLSPGERA | EVQLVESGGGLVQPGRSLRLSCAASGFT | DIQMTQSPSSLSASV |
| NKp46- | TLSCRASQSVRSYLAWYQQ | FDNYAMHWVRQAPGKGLEWVSGISRSSG | GDRVTITCRASQDIS |
| IL 15 | KPGQAPRLLFSDASNRATG | DIDYADSVKGRFTISRDNAKNSLYLQMN | NYLNWYQQKPGKAPK |
| | IPARFSGSGSGTDFTLTIS | SLRAEDTALYYCARGGVGSFDTWGQGTM | LLIYYTSRLHSGVPS |
| | SLEPEDFAVYYCQQYRYSP | VTVSSASTKGPSVFPLAPSSKSTSGGTA | RFSGSGSGTDFTFTI |
| | RTFGQGTKVEIKRTVAAPS | ALGCLVKDYFPEPVTVSWNSGALTSGVH | SSLQPEDIATYFCQQ |
| | VFIFPPSDEQLKSGTASVV | TFPAVLQSSGLYSLSSVVTVPSSSLGTQ | GNTRPWTFGGGTKVE |
| | CLLNNFYPREAKVQWKVDN | TYICNVNHKPSNTKVDKRVEPKSCDKTH | IKASTKGPSVFPLAP |
| | ALQSGNSQESVTEQDSKDS | TCPPCPAPELLGGPSVFLFPPKPKDTLM | SSKSTSGGTAALGCL |
| | TYSLSSTLTLSKADYEKHK | ISRTPEVTCVVVDVSHEDPEVKFNWYVD | VKDYFPEPVTVSWNS |
| | VYACEVTHQGLSSPVTKSF | GVEVHNAKTKPREEQYNSTYRVVSVLTV | GALTSGVHTFPAVLQ |
| | NRGECDKTHTCPPCPAPEL | LHQDWLNGKEYKCKVSNKALPAPIEKTI | SSGLYSLSSVVTVPS |
| | LGGPSVFLFPPKPKDTLMI | SKAKGQPREPQVYTLPPSREEMTKNQVS | SSLGTQTYICNVNHK |
| | SRTPEVTCVVVDVSHEDPE | LTCLVKGFYPSDIAVEWESNGQPENNYK | PSNTKVDKRVEPKSC |
| | VKFNWYVDGVEVHNAKTKP | TTPPVLDSDGSFFLYSKLTVDKSRWQQG | DKTHSGGGGSGGGGS |
| | REEQYNSTYRVVSVLTVLH | NVFSCSVMHEALHNHYTQKSLSLSPGST | GGGGSNWVNVISDLK |
| | QDWLNGKEYKCKVSNKALP | GSQVQLVQSGAEVKKPGSSVKVSCKASG | KIEDLIQSMHIDATL |
| | APIEKTISKAKGQPREPQV | YTFSDYVINWVRQAPGQGLEWMGEIYPG | YTESDVHPSCKVTAM |
| | YTLPPSREEMTKNQVSLTC | SGTNYYNEKFKAKATITADKSTSTAYME | KCFLLELQVISLESG |
| | LVKGFYPSDIAVEWESNGQ | LSSLRSEDTAVYYCARRGRYGLYAMDYW | DASIHDTVENLIILA |
| | PENNYKTTPPVLDSDGSFF | GQGTTVTVSSRTVAAPSVFIFPPSDEQL | NNSLSSNGNVTESGC |
| | LYSKLTVDKSRWQQGNVFS | KSGTASVVCLLNNFYPREAKVQWKVDNA | KECEELEEKNIKEFL |
| | CSVMHEALHNRFTQKSLSL | LQSGNSQESVTEQDSKDSTYSLSSTLTL | QSFVHIVQMFINTS |
| | SPGK | SKADYEKHKVYACEVTHQGLSSPVTKSF | (SEQ ID NO: 485) |
| | (SEQ ID NO: 483) | NRGEC | |
| | | (SEQ ID NO: 484) | |
| CD20- | DIVMTQTPLSLPVTPGEPA | QVQLVQSGAEVKKPGSSVKVSCKASGYA | DIQMTQSPSSLSASV |
| T5A- | SISCRSSKSLLHSNGITYL | FSYSWINWVRQAPGQGLEWMGRIFPGDG | GDRVTITCRASQDIS |
| NKp46- | YWYLQKPGQSPQLLIYQMS | DTDYNGKFKGRVTITADKSTSTAYMELS | NYLNWYQQKPGKAPK |
| IL 18v | NLVSGVPDRFSGSGSGTDF | SLRSEDTAVYYCARNVEDGYWLVYWGQG | LLIYYTSRLHSGVPS |
| | TLKISRVEAEDVGVYYCAQ | TLVTVSSASTKGPSVFPLAPSSKSTSGG | RFSGSGSGTDFTFTI |
| | NLELPYTFGGGTKVEIKRT | TAALGCLVKDYFPEPVTVSWNSGALTSG | SSLQPEDIATYFCQQ |
| | VAAPSVFIFPPSDEQLKSG | VHTFPAVLQSSGLYSLSSVVTVPSSSLG | GNTRPWTFGGGTKVE |
| | TASVVCLLNNFYPREAKVQ | TQTYICNVNHKPSNTKVDKRVEPKSCDK | IKASTKGPSVFPLAP |
| | WKVDNALQSGNSQESVTEQ | THTCPPCPAPELLGGPSVFLFPPKPKDT | SSKSTSGGTAALGCL |
| | DSKDSTYSLSSTLTLSKAD | LMISRTPEVTCVVVDVSHEDPEVKENWY | VKDYFPEPVTVSWNS |
| | YEKHKVYACEVTHQGLSSP | VDGVEVHNAKTKPREEQYNSTYRVVSVL | GALTSGVHTFPAVLQ |
| | VTKSFNRGECDKTHTCPPC | TVLHQDWLNGKEYKCKVSNKALPAPIEK | SSGLYSLSSVVTVPS |
| | PAPELLGGPSVFLFPPKPK | TISKAKGQPREPQVYTLPPSREEMTKNQ | SSLGTQTYICNVNHK |
| | DTLMISRTPEVTCVVVDVS | VSLTCLVKGFYPSDIAVEWESNGQPENN | PSNTKVDKRVEPKSC |
| | HEDPEVKFNWYVDGVEVHN | YKTTPPVLDSDGSFFLYSKLTVDKSRWQ | DKTHSGGSGGGGSGG |
| | AKTKPREEQYNSTYRVVSV | QGNVFSCSVMHEALHNHYTQKSLSLSPG | GGSGGYFGKLESKLS |
| | LTVLHQDWLNGKEYKCKVS | STGSQVQLVQSGAEVKKPGSSVKVSCKA | VIRNLNDQVLFIDQG |
| | NKALPAPIEKTISKAKGQP | SGYTFSDYVINWVRQAPGQGLEWMGEIY | NRPLFEDMTDSDCRD |
| | REPQVYTLPPSREEMTKNQ | PGSGTNYYNEKFKAKATITADKSTSTAY | NAPRTIFIISKYGDS |
| | VSLTCLVKGFYPSDIAVEW | MELSSLRSEDTAVYYCARRGRYGLYAMD | GARGLAVTISVKCEK |
| | ESNGQPENNYKTTPPVLDS | YWGQGTTVTVSSRTVAAPSVFIFPPSDE | ISTLSCENKIISFKE |
| | DGSFFLYSKLTVDKSRWQQ | QLKSGTASVVCLLNNFYPREAKVQWKVD | MNPPDNIKDTKSDII |
| | GNVFSCSVMHEALHNRFTQ | NALQSGNSQESVTEQDSKDSTYSLSSTL | FFERDVPGHSGKVQF |
| | KSLSLSPGK | TLSKADYEKHKVYACEVTHQGLSSPVTK | ESSSYEGYFLACEKE |
| | (SEQ ID NO: 486) | SFNRGEC | RDLFKLILKKEDELG |
| | | (SEQ ID NO: 487) | DRSIMFTVQNED |
| | | | (SEQ ID NO: 488) |
| CD20- | DIVMTQTPLSLPVTPGEPA | QVQLVQSGAEVKKPGSSVKVSCKASGYA | EIVLTQSPGTLSLSP |
| T6AB3- | SISCRSSKSLLHSNGITYL | FSYSWINWVRQAPGQGLEWMGRIFPGDG | GERATLSCRASQSVS |
| IC-IL18v | YWYLQKPGQSPQLLIYQMS | DTDYNGKFKGRVTITADKSTSTAYMELS | SSYLAWYQQKPGQAP |
| | NLVSGVPDRFSGSGSGTDF | SLRSEDTAVYYCARNVFDGYWLVYWGQG | RLLIYGASSRATGIP |
| | TLKISRVEAEDVGVYYCAQ | TLVTVSSASTKGPSVFPLAPSSKSTSGG | DRFSGSGSGTDFTLT |
| | NLELPYTFGGGTKVEIKRT | TAALGCLVKDYFPEPVTVSWNSGALTSG | ISRLEPEDFAVYYCQ |
| | VAAPSVFIFPPSDEQLKSG | VHTFPAVLQSSGLYSLSSVVTVPSSSLG | QYGSSTWTFGQGTKV |
| | TASVVCLLNNFYPREAKVQ | TQTYICNVNHKPSNTKVDKRVEPKSCDK | EIKASTKGPSVFPLA |
| | WKVDNALQSGNSQESVTEQ | THTCPPCPAPEAEGAPSVELFPPKPKDT | PSSKSTSGGTAALGC |
| | DSKDSTYSLSSTLTLSKAD | LMISRTPEVTCVVVDVSHEDPEVKENWY | LVKDYFPEPVTVSWN |
| | YEKHKVYACEVTHQGLSSP | VDGVEVHNAKTKPREEQYNSTYRVVSVL | SGALTSGVHTFPAVL |
| | VTKSFNRGECDKTHTCPPC | TVLHQDWLNGKEYKCKVSNKALPSSIEK | QSSGLYSLSSVVTVP |
| | PAPEAEGAPSVFLFPPKPK | TISKAKGQPREPQVYTLPPSREEMTKNQ | SSSLGTQTYICNVNH |
| | DTLMISRTPEVTCVVVDVS | VSLTCLVKGFYPSDIAVEWESNGQPENN | KPSNTKVDKRVEPKS |
| | HEDPEVKFNWYVDGVEVHN | YKTTPPVLDSDGSFFLYSKLTVDKSRWQ | CDKTHSGGSGGGGSG |
| | AKTKPREEQYNSTYRVVSV | QGNVFSCSVMHEALHNHYTQKSLSLSPG | GGGSGGYFGKLESKL |
| | LTVLHQDWLNGKEYKCKVS | STGSEVQLVQSGAEVKKSGESLKISCKG | SVIRNLNDQVLFIDQ |
| | NKALPSSIEKTISKAKGQP | SGYSFTSYWIGWVRQMPGKGLEWMGIFY | GNRPLFEDMTDSDCR |
| | REPQVYTLPPSREEMTKNQ | PGDSSTRYSPSFQGQVTISADKSVNTAY | DNAPRTIFIISKYGD |
| | VSLTCLVKGFYPSDIAVEW | LQWSSLKASDTAMYYCARRRNWGNAFDI | SGARGLAVTISVKCE |
| | ESNGQPENNYKTTPPVLDS | WGQGTMVTVSSRTVAAPSVFIFPPSDEQ | KISTLSCENKIISFK |
| | DGSFFLYSKLTVDKSRWQQ | LKSGTASVVCLLNNFYPREAKVQWKVDN | EMNPPDNIKDTKSDI |
| | GNVFSCSVMHEALHNRFTQ | ALQSGNSQESVTEQDSKDSTYSLSSTLT | IFFERDVPGHSGKVQ |
| | KSLSLSPGK | LSKADYEKHKVYACEVTHQGLSSPVTKS | FESSSYEGYFLACEK |
| | (SEQ ID NO: 489) | FNRGEC | ERDLFKLILKKEDEL |
| | | (SEQ ID NO: 490) | GDRSIMFTVQNED |
| | | | (SEQ ID NO: 491) |
| IC-T5A- | EIVLTQSPATLSLSPGERA | EVQLVESGGGLVQPGRSLRLSCAASGFT | DIQMTQSPSSLSASV |
| NKp46- | TLSCRASQSVRSYLAWYQQ | FDNYAMHWVRQAPGKGLEWVSGISRSSG | GDRVTITCRASQDIS |
| IL 18v | KPGQAPRLLFSDASNRATG | DIDYADSVKGRFTISRDNAKNSLYLQMN | NYLNWYQQKPGKAPK |
| | IPARFSGSGSGTDFTLTIS | SLRAEDTALYYCARGGVGSFDTWGQGTM | LLIYYTSRLHSGVPS |
| | SLEPEDFAVYYCQQYRYSP | VTVSSASTKGPSVFPLAPSSKSTSGGTA | RFSGSGSGTDFTFTI |
| | RTFGQGTKVEIKRTVAAPS | ALGCLVKDYFPEPVTVSWNSGALTSGVH | SSLQPEDIATYFCQQ |
| | VFIFPPSDEQLKSGTASVV | TFPAVLQSSGLYSLSSVVTVPSSSLGTQ | GNTRPWTFGGGTKVE |
| | CLLNNFYPREAKVQWKVDN | TYICNVNHKPSNTKVDKRVEPKSCDKTH | IKASTKGPSVFPLAP |
| | ALQSGNSQESVTEQDSKDS | TCPPCPAPELLGGPSVFLFPPKPKDTLM | SSKSTSGGTAALGCL |
| | TYSLSSTLTLSKADYEKHK | ISRTPEVTCVVVDVSHEDPEVKFNWYVD | VKDYFPEPVTVSWNS |
| | VYACEVTHQGLSSPVTKSF | GVEVHNAKTKPREEQYNSTYRVVSVLTV | GALTSGVHTFPAVLQ |
| | NRGECDKTHTCPPCPAPEL | LHQDWLNGKEYKCKVSNKALPAPIEKTI | SSGLYSLSSVVTVPS |
| | LGGPSVFLFPPKPKDTLMI | SKAKGQPREPQVYTLPPSREEMTKNQVS | SSLGTQTYICNVNHK |
| | SRTPEVTCVVVDVSHEDPE | LTCLVKGFYPSDIAVEWESNGQPENNYK | PSNTKVDKRVEPKSC |
| | VKFNWYVDGVEVHNAKTKP | TTPPVLDSDGSFFLYSKLTVDKSRWQQG | DKTHSGGSGGGGSGG |
| | REEQYNSTYRVVSVLTVLH | NVFSCSVMHEALHNHYTQKSLSLSPGST | GGSGGYFGKLESKLS |
| | QDWLNGKEYKCKVSNKALP | GSQVQLVQSGAEVKKPGSSVKVSCKASG | VIRNLNDQVLFIDQG |
| | APIEKTISKAKGQPREPQV | YTFSDYVINWVRQAPGQGLEWMGEIYPG | NRPLFEDMTDSDCRD |
| | YTLPPSREEMTKNQVSLTC | SGTNYYNEKFKAKATITADKSTSTAYME | NAPRTIFIISKYGDS |
| | LVKGFYPSDIAVEWESNGQ | LSSLRSEDTAVYYCARRGRYGLYAMDYW | GARGLAVTISVKCEK |
| | PENNYKTTPPVLDSDGSFF | GQGTTVTVSSRTVAAPSVFIFPPSDEQL | ISTLSCENKIISFKE |
| | LYSKLTVDKSRWQQGNVFS | KSGTASVVCLLNNFYPREAKVQWKVDNA | MNPPDNIKDTKSDII |
| | CSVMHEALHNRFTQKSLSL | LQSGNSQESVTEQDSKDSTYSLSSTLTL | FFERDVPGHSGKVQF |
| | SPGK | SKADYEKHKVYACEVTHQGLSSPVTKSF | ESSSYEGYFLACEKE |
| | (SEQ ID NO: 492) | NRGEC | RDLFKLILKKEDELG |
| | | (SEQ ID NO: 493) | DRSIMFTVQNED |
| | | | (SEQ ID NO: 494) |
| CD20- | DIVMTQTPLSLPVTPGEPA | QVQLVQSGAEVKKPGSSVKVSCKASGYA | DIQMTQSPSSLSASV |
| T5A- | SISCRSSKSLLHSNGITYL | FSYSWINWVRQAPGQGLEWMGRIFPGDG | GDRVTITCRASQDIS |
| NKp46- | YWYLQKPGQSPQLLIYQMS | DTDYNGKFKGRVTITADKSTSTAYMELS | NYLNWYQQKPGKAPK |
| IFNαv | NLVSGVPDRFSGSGSGTDF | SLRSEDTAVYYCARNVEDGYWLVYWGQG | LLIYYTSRLHSGVPS |
| | TLKISRVEAEDVGVYYCAQ | TLVTVSSASTKGPSVFPLAPSSKSTSGG | RFSGSGSGTDFTFTI |
| | NLELPYTFGGGTKVEIKRT | TAALGCLVKDYFPEPVTVSWNSGALTSG | SSLQPEDIATYFCQQ |
| | VAAPSVFIFPPSDEQLKSG | VHTFPAVLQSSGLYSLSSVVTVPSSSLG | GNTRPWTFGGGTKVE |
| | TASVVCLLNNFYPREAKVQ | TQTYICNVNHKPSNTKVDKRVEPKSCDK | IKASTKGPSVFPLAP |
| | WKVDNALQSGNSQESVTEQ | THTCPPCPAPELLGGPSVFLFPPKPKDT | SSKSTSGGTAALGCL |
| | DSKDSTYSLSSTLTLSKAD | LMISRTPEVTCVVVDVSHEDPEVKENWY | VKDYFPEPVTVSWNS |
| | YEKHKVYACEVTHQGLSSP | VDGVEVHNAKTKPREEQYNSTYRVVSVL | GALTSGVHTFPAVLQ |
| | VTKSFNRGECDKTHTCPPC | TVLHQDWLNGKEYKCKVSNKALPAPIEK | SSGLYSLSSVVTVPS |
| | PAPELLGGPSVFLFPPKPK | TISKAKGQPREPQVYTLPPSREEMTKNQ | SSLGTQTYICNVNHK |
| | DTLMISRTPEVTCVVVDVS | VSLTCLVKGFYPSDIAVEWESNGQPENN | PSNTKVDKRVEPKSC |
| | HEDPEVKFNWYVDGVEVHN | YKTTPPVLDSDGSFFLYSKLTVDKSRWQ | DKTHSGGGGSGGGGS |
| | AKTKPREEQYNSTYRVVSV | QGNVFSCSVMHEALHNHYTQKSLSLSPG | GGGGSDLPQTHSLGS |
| | LTVLHQDWLNGKEYKCKVS | STGSQVQLVQSGAEVKKPGSSVKVSCKA | RRTLMLLAQMRRISL |
| | NKALPAPIEKTISKAKGQP | SGYTFSDYVINWVRQAPGQGLEWMGEIY | FSCAKDRHDFGFPQE |
| | REPQVYTLPPSREEMTKNQ | PGSGTNYYNEKFKAKATITADKSTSTAY | EFGNQFQKAETIPVL |
| | VSLTCLVKGFYPSDIAVEW | MELSSLRSEDTAVYYCARRGRYGLYAMD | HEMIQQIFNLFSTKD |
| | ESNGQPENNYKTTPPVLDS | YWGQGTTVTVSSRTVAAPSVFIFPPSDE | SSAAWDETLLDKFYT |
| | DGSFFLYSKLTVDKSRWQQ | QLKSGTASVVCLLNNFYPREAKVQWKVD | ELYQQLNDLEACVIQ |
| | GNVFSCSVMHEALHNRFTQ | NALQSGNSQESVTEQDSKDSTYSLSSTL | GVGVTETPLMKEDSI |
| | KSLSLSPGK | TLSKADYEKHKVYACEVTHQGLSSPVTK | LAVRKYFQRITLYLK |
| | (SEQ ID NO: 495) | SFNRGEC | EKKYSPCAWEVVRAE |
| | | (SEQ ID NO: 496) | IMRSFSLSTNLQESL |
| | | | RSKE |
| | | | (SEQ ID NO: 497) |
| CD20- | DIVMTQTPLSLPVTPGEPA | QVQLVQSGAEVKKPGSSVKVSCKASGYA | EIVLTQSPGTLSLSP |
| T6AB3- | SISCRSSKSLLHSNGITYL | FSYSWINWVRQAPGQGLEWMGRIFPGDG | GERATLSCRASQSVS |
| IC- | YWYLQKPGQSPQLLIYQMS | DTDYNGKFKGRVTITADKSTSTAYMELS | SSYLAWYQQKPGQAP |
| IFNαv | NLVSGVPDRFSGSGSGTDF | SLRSEDTAVYYCARNVFDGYWLVYWGQG | RLLIYGASSRATGIP |
| | TLKISRVEAEDVGVYYCAQ | TLVTVSSASTKGPSVFPLAPSSKSTSGG | DRFSGSGSGTDFTLT |
| | NLELPYTFGGGTKVEIKRT | TAALGCLVKDYFPEPVTVSWNSGALTSG | ISRLEPEDFAVYYCQ |
| | VAAPSVFIFPPSDEQLKSG | VHTFPAVLQSSGLYSLSSVVTVPSSSLG | QYGSSTWTFGQGTKV |
| | TASVVCLLNNFYPREAKVQ | TQTYICNVNHKPSNTKVDKRVEPKSCDK | EIKASTKGPSVFPLA |
| | WKVDNALQSGNSQESVTEQ | THTCPPCPAPEAEGAPSVELFPPKPKDT | PSSKSTSGGTAALGC |
| | DSKDSTYSLSSTLTLSKAD | LMISRTPEVTCVVVDVSHEDPEVKENWY | LVKDYFPEPVTVSWN |
| | YEKHKVYACEVTHQGLSSP | VDGVEVHNAKTKPREEQYNSTYRVVSVL | SGALTSGVHTFPAVL |
| | VTKSFNRGECDKTHTCPPC | TVLHQDWLNGKEYKCKVSNKALPSSIEK | QSSGLYSLSSVVTVP |
| | PAPEAEGAPSVFLFPPKPK | TISKAKGQPREPQVYTLPPSREEMTKNQ | SSSLGTQTYICNVNH |
| | DTLMISRTPEVTCVVVDVS | VSLTCLVKGFYPSDIAVEWESNGQPENN | KPSNTKVDKRVEPKS |
| | HEDPEVKFNWYVDGVEVHN | YKTTPPVLDSDGSFFLYSKLTVDKSRWQ | CDKTHSGGGGSGGGG |
| | AKTKPREEQYNSTYRVVSV | QGNVFSCSVMHEALHNHYTQKSLSLSPG | SGGGGSDLPQTHSLG |
| | LTVLHQDWLNGKEYKCKVS | STGSEVQLVQSGAEVKKSGESLKISCKG | SRRTLMLLAQMRRIS |
| | NKALPSSIEKTISKAKGQP | SGYSFTSYWIGWVRQMPGKGLEWMGIFY | LFSCAKDRHDFGFPQ |
| | REPQVYTLPPSREEMTKNQ | PGDSSTRYSPSFQGQVTISADKSVNTAY | EEFGNQFQKAETIPV |
| | VSLTCLVKGFYPSDIAVEW | LQWSSLKASDTAMYYCARRRNWGNAFDI | LHEMIQQIFNLFSTK |
| | ESNGQPENNYKTTPPVLDS | WGQGTMVTVSSRTVAAPSVFIFPPSDEQ | DSSAAWDETLLDKFY |
| | DGSFFLYSKLTVDKSRWQQ | LKSGTASVVCLLNNFYPREAKVQWKVDN | TELYQQLNDLEACVI |
| | GNVFSCSVMHEALHNRFTQ | ALQSGNSQESVTEQDSKDSTYSLSSTLT | QGVGVTETPLMKEDS |
| | KSLSLSPGK | LSKADYEKHKVYACEVTHQGLSSPVTKS | ILAVRKYFQRITLYL |
| | (SEQ ID NO: 498) | FNRGEC | KEKKYSPCAWEVVRA |
| | | (SEQ ID NO: 499) | EIMRSFSLSTNLQES |
| | | | LRSKE |
| | | | (SEQ ID NO: 500) |
| IC-T5A- | EIVLTQSPATLSLSPGERA | EVQLVESGGGLVQPGRSLRLSCAASGFT | DIQMTQSPSSLSASV |
| NKp46- | TLSCRASQSVRSYLAWYQQ | FDNYAMHWVRQAPGKGLEWVSGISRSSG | GDRVTITCRASQDIS |
| IFNαv | KPGQAPRLLFSDASNRATG | DIDYADSVKGRFTISRDNAKNSLYLQMN | NYLNWYQQKPGKAPK |
| | IPARFSGSGSGTDFTLTIS | SLRAEDTALYYCARGGVGSFDTWGQGTM | LLIYYTSRLHSGVPS |
| | SLEPEDFAVYYCQQYRYSP | VTVSSASTKGPSVFPLAPSSKSTSGGTA | RFSGSGSGTDFTFTI |
| | RTFGQGTKVEIKRTVAAPS | ALGCLVKDYFPEPVTVSWNSGALTSGVH | SSLQPEDIATYFCQQ |
| | VFIFPPSDEQLKSGTASVV | TFPAVLQSSGLYSLSSVVTVPSSSLGTQ | GNTRPWTFGGGTKVE |
| | CLLNNFYPREAKVQWKVDN | TYICNVNHKPSNTKVDKRVEPKSCDKTH | IKASTKGPSVFPLAP |
| | ALQSGNSQESVTEQDSKDS | TCPPCPAPELLGGPSVFLFPPKPKDTLM | SSKSTSGGTAALGCL |
| | TYSLSSTLTLSKADYEKHK | ISRTPEVTCVVVDVSHEDPEVKFNWYVD | VKDYFPEPVTVSWNS |
| | VYACEVTHQGLSSPVTKSF | GVEVHNAKTKPREEQYNSTYRVVSVLTV | GALTSGVHTFPAVLQ |
| | NRGECDKTHTCPPCPAPEL | LHQDWLNGKEYKCKVSNKALPAPIEKTI | SSGLYSLSSVVTVPS |
| | LGGPSVFLFPPKPKDTLMI | SKAKGQPREPQVYTLPPSREEMTKNQVS | SSLGTQTYICNVNHK |
| | SRTPEVTCVVVDVSHEDPE | LTCLVKGFYPSDIAVEWESNGQPENNYK | PSNTKVDKRVEPKSC |
| | VKFNWYVDGVEVHNAKTKP | TTPPVLDSDGSFFLYSKLTVDKSRWQQG | DKTHSGGGGSGGGGS |
| | REEQYNSTYRVVSVLTVLH | NVFSCSVMHEALHNHYTQKSLSLSPGST | GGGGSDLPQTHSLGS |
| | QDWLNGKEYKCKVSNKALP | GSQVQLVQSGAEVKKPGSSVKVSCKASG | RRTLMLLAQMRRISL |
| | APIEKTISKAKGQPREPQV | YTFSDYVINWVRQAPGQGLEWMGEIYPG | FSCAKDRHDFGFPQE |
| | YTLPPSREEMTKNQVSLTC | SGTNYYNEKFKAKATITADKSTSTAYME | EFGNQFQKAETIPVL |
| | LVKGFYPSDIAVEWESNGQ | LSSLRSEDTAVYYCARRGRYGLYAMDYW | HEMIQQIFNLFSTKD |
| | PENNYKTTPPVLDSDGSFF | GQGTTVTVSSRTVAAPSVFIFPPSDEQL | SSAAWDETLLDKFYT |
| | LYSKLTVDKSRWQQGNVFS | KSGTASVVCLLNNFYPREAKVQWKVDNA | ELYQQLNDLEACVIQ |
| | CSVMHEALHNRFTQKSLSL | LQSGNSQESVTEQDSKDSTYSLSSTLTL | GVGVTETPLMKEDSI |
| | SPGK | SKADYEKHKVYACEVTHQGLSSPVTKSF | LAVRKYFQRITLYLK |
| | (SEQ ID NO: 501) | NRGEC | EKKYSPCAWEVVRAE |
| | | (SEQ ID NO: 502) | IMRSFSLSTNLQESL |
| | | | RSKE |
| | | | (SEQ ID NO: 503) |

### Example 1: IL2v Limits IL2R Activation on Treg

[0618] The heterotrimeric Fc-domain-containing protein IC-T6-IC-IL2v containing one C-terminal moiety of mutant IL-2 was assessed for its ability to activate Treg cells. The IC-T6-IC-IL2v incorporates a variant IL-2 polypeptide (IL-2v), a human IL-2 polypeptide comprising the mutations T3A, C125A, F42A, Y45A and L72G, conferring decreased binding affinity for CD25 compared to wild-type human IL-2.

[0619] The heterotrimeric IC-T6-IC-IL2v protein is a T6 format protein (see FIG. 21 for the general structure) having an IL2v fused to the C-terminus of one of the chains of an isotype control (IC) Fab, which in turn was fused to the C-terminus of an Fc domain mutated to substantially eliminate CD16A binding, in turn fused to another IC Fab. The IC Fabs have VH/VL which do not bind to any protein in the test system. The heterotrimeric IC-T6-IC-IL2v was compared to an identical heterotrimeric protein in which IL2v was replaced by a wild-type human IL-2 polypeptide (IC-T6-IC-IL2pWT), and to recombinantly produced full-length wild-type IL-2 (rec IL-2).

[0620] Briefly, 1M/well of purified PBMC were seeded in 96-well plates and treated with increasing doses of recombinant huIL-2, IC-T6-IC-IL2 or IC-T6-IC-IL2v (dose from 133 nM to 0,0000013 nM) for 20 min at 37° C., 5.5% CO2 in incubator. STAT5 phosphorylation was then analysed by flow cytometry on Tregs (gated on CD3+ CD4+ CD25+ FoxP3+).

[0621] Results are shown in FIG. 3. IC-T6-IC-IL2v (“IL2v immunoconjugate”) resulted in an approximately 3-log increase in the EC₅₀ for STAT5 phosphorylation among the Treg, compared to IC-T6-IC-IL2WT (“IL2pWT immunoconjugate”) and wild-type IL-2 (“Rec-huIL2”). The IC-T6-IC-IL2v protein incorporating a mutated human IL-2 therefore displays a strongly decreased ability to activate cytokine receptor signalling in Treg cells compared to wild-type IL-2.

### Example 2: NKCE-IL2v Promotes IL2R Activation Selectively in NK Cells

[0622] We assessed whether adding a NKp46-binding function to the Fc-domain-containing and IL2v-containing heterotrimeric protein of Example 1 would promote IL-2R signalling in NK cells. We therefore evaluated different multispecific proteins (also referred to as NK cell engager (NKCE) proteins that bound NKp46 and contained an IL2v moiety (NKCE-IL2v). In order to provide a comparison to well-known anti-tumor antibodies, the NKCE were made to bind CD20 by incorporating anti-CD20 VH/VL pair from the FDA-approved humanized antibody GA101 (Obinutuzumab, Roche).

[0623] The heterotrimeric Fc-domain-containing protein CD20-T5-NKp46-IL2v was assessed for its ability to activate cytokine receptor signalling on Treg cells, NK cells, CD4 T cells and CD8 T cells. The CD20-T5-NKp46-IL2v protein format, shown in FIGS. 2A and 2G, has an antigen binding domain that binds CD20 positioned N-terminally, and incorporates a C-terminal positioned IL-2v comprising the mutations T3A, C125A, F42A, Y45A and L72G, a wild-type Fc domain (i.e. that binds human CD16A), and an antigen binding domain that binds NKp46 placed between the Fc domain and the IL2v.

[0624] Briefly, 1M/well of purified PBMC were seeded in 96-well plate and treated with increasing doses of NKCE-IL2v or IL2v immunoconjugate (dose from 133 nM to 0.0000013 nM) for 20 min at 37° C., 5.5% CO₂ in incubator. STAT5 phosphorylation was then analysed by flow cytometry on NK cells (CD3−CD56+), CD8 T cells (CD3+CD8+), CD4 T cells (CD3+CD4+FoxP3−) and Tregs (gated on CD3+CD4+CD25+FoxP3+).

[0625] Results are shown in FIG. 4 showing % of pSTAT5 cells among targeted cells on the y-axis and concentration of test protein on the x-axis. CD20-T5-NKp46-IL2v and IC-T6-IC-IL2v displayed comparable activation of Treg cells, CD4 T cells and CD8 T cells. However, the CD20-T5-NKp46-IL2v induced a decrease of about two orders of magnitude in the EC₅₀ for STAT5 phosphorylation among the NK cells, compared to IC-T6-IC-IL2 that did not bind NKp46 or CD16A. The CD20-T5-NKp46-IL2v protein therefore permitted selective cytokine receptor signalling in NK cells over Treg cells, CD4 T cells and CD8 T cells.

### Example 3: Both CD16 and NKp46 are Important to Promote IL2R Signaling on NK Cells Induced by NKCE-IL2v

[0626] We sought to investigate the effect on IL-2R signaling in NK cells by a multispecific protein that binds to CD16 and/or NKp46 in addition to IL-2R.

[0627] A series of heterotrimeric IL2v- and Fc-domain-containing proteins were constructed that shared the same overall structure, but in which the NKp46 and tumor-antigen binding domains were individually replaced with isotype control (IC) domains that maintained the domain structure but that lacked binding to any protein in the assay system, or where the Fc domain was an Fc domain that bound CD16A (in “T5” proteins) or a mutated Fc domain (N297S) that lacked CD16A binding (in “T6” proteins). The test proteins included in this experiment:
[0628] IC-T6-IC-IL2v: contains topologically from N- to C-terminus, IC VH/VL, Fc domain dimer mutated to abolish CD16 binding, IC VH/VL pair, IL2v.
[0629] CD20-T6-IC-IL2v: contains from topological N- to C-terminus, anti-CD20 VH/VL pair, Fc domain dimer mutated to abolish CD16 binding, IC VH/VL pair, IL2v.
[0630] CD20-T5-IC-IL2v: contains from topological N- to C-terminus, anti-CD20 VH/VL pair, wild-type Fc domain dimer that binds CD16, IC VH/VL pair, IL2v.
[0631] CD20-T6-NKp46-IL2v: contains from topological N- to C-terminus, anti-CD20 VH/VL pair, Fc domain dimer mutated to abolish CD16 binding, anti-NKp46-1 VH/VL pair, IL2v.
[0632] CD20-T5-NKp46-IL2v: contains from topological N- to C-terminus, anti-CD20 VH/VL pair, wild-type Fc domain dimer that binds CD16, anti-NKp46-1 VH/VL pair, IL2v.

[0633] Briefly, 1M/well of purified PBMC were seeded in 96-well plate and treated with increasing doses of various NKCE-IL2v (dose from 133 nM to 0.0000013 nM) for 20 min at 37° C., 5.5% CO₂ in incubator. STAT5 phosphorylation was then analyzed by flow cytometry on NK cells (gated on CD3-CD56+).

[0634] Results are shown in FIG. 5 showing % of pSTAT5 cells among NK cells on the y-axis and concentration of test protein on the x-axis. IC-T6-IC-IL2v and CD20-T6-IC-IL2v displayed comparable promoting IL2R signaling in NK cells, showing that the CD20 binding domain did not have an effect in this model in which tumor target cells are absent. The CD20-T5-IC-IL2v which additionally has CD16 binding ability via its wild-type Fc domain dimer, resulted in increased IL2R signaling in the NK cells. The CD20-T6-NKp46-IL2v which can bind NKp46 but not CD16 was more potent in promoting IL2R signaling in the NK cells compared to the CD20-T5-IC-IL2v which bound CD16 but not NKp46. However, the CD20-T5-NKp46-IL2v which bound both CD16 and NKp46 (in addition to the IL2v moiety) resulted in strong increase in potency (an approximately 1-log decrease in EC₅₀) in percent of pSTAT5+ cells among the NK cells, compared to CD20-T6-NKp46-IL2v. IL-2R signaling in NK cells was therefore enhanced by each of NKp46 and CD16, and with a particularly strong enhancement when both NKp46 and CD16 were bound in addition to IL-2R.

### Example 4: NKCE-IL2v Induces NK Cell Activation in the Presence and Absence of Target Cells

[0635] In this experiment, NK cell engager proteins were assessed for their ability to induce activation of NK cells, either in the presence or absence of tumor target cells.

[0636] A series of heterotrimeric IL2v- and Fc-domain-containing proteins were tested to evaluate the effect of binding to different NK and target cell receptors, individually and in combination. The test proteins included in this experiment:
[0637] CD20-T5-NKp46-IL2v: contains topologically from N- to C-terminus, anti-CD20 VH/VL pair, Fc domain dimer that binds CD16, anti-NKp46-1 VH/VL pair, IL-2v.
[0638] CD20-F5-NKp46: contains from topological N- to C-terminus, anti-CD20 VH/VL pair, Fc domain dimer that binds CD16, anti-NKp46-1 VH/VL pair. The F5 protein shares the same essential domain arrangement with the T5 protein, except that the IL2v is absent.
[0639] CD20-T5-IC-IL2v: contains from topological N- to C-terminus, anti-CD20 VH/VL pair, Fc domain dimer that binds CD16, IC VH/VL pair, IL2v.
[0640] CD20-T6-NKp46-IL2v: contains from topological N- to C-terminus, anti-CD20 VH/VL pair, Fc domain dimer mutated to abolish CD16 binding, anti-NKp46-1 VH/VL pair, IL2v.
[0641] IC-T5-NKp46-IL2v: contains from topological N- to C-terminus, IC VH/VL pair, Fc domain dimer that binds CD16, anti-NKp46-1 VH/VL pair, IL2v.
[0642] IC-T6-IC-IL2v: contains from topological N- to C-terminus, IC VH/VL pair, Fc domain dimer mutated to abolish CD16 binding, IC VH/VL pair, IL2v.

[0643] Briefly, purified NK cells were cultured for 5 days in presence of the test proteins. NK cell activation was evaluated by quantification of the CD69 activation marker expression on NK cells monitored by flow cytometry.

[0644] Results are shown in FIG. 6 showing % of CD69-expressing NK cells on the y-axis and concentration of test protein on the x-axis, in the absence of tumor cells. The CD20-F5-NKp46 that bound CD20, NKp46 and CD16 but lacked the IL2v moiety did not activate NK cells in the absence of tumor cells, while all the proteins containing the IL2v moiety resulted in strong NK cell activation, with an additional benefit seen for the proteins that had a NKp46 binding domain and a wild-type Fc domain compared to the IC-T6-IC-IL2v protein that lacked CD16 and NKp46 binding.

### Example 5: NKCE-IL2v Promotes NK Cell Proliferation

[0645] In this experiment, NK cell engager proteins were assessed for their ability to induce proliferation of NK cells upon 5 days of incubation.

[0646] The test proteins included in this experiment:
[0647] CD20-T5-NKp46-IL2v: contains topologically from N- to C-terminus, anti-CD20 VH/VL pair, Fc domain dimer that binds CD16, anti-NKp46-1 VH/VL pair, IL-2v.
[0648] CD20-F5-NKp46: contains from topological N- to C-terminus, anti-CD20 VH/VL pair, Fc domain dimer that binds CD16, anti-NKp46-1 VH/VL pair.
[0649] CD20-T5-IC-IL2v: contains from topological N- to C-terminus, anti-CD20 VH/VL pair, Fc domain dimer that binds CD16, IC VH/VL pair (isotype control VH/VL pair that does not bind to any protein in the assay system), IL2v.
[0650] CD20-T6-NKp46-IL2v: contains from topological N- to C-terminus, anti-CD20 VH/VL pair, Fc domain dimer mutated to abolish CD16 binding, anti-NKp46-1 VH/VL pair, IL2v.
[0651] IC-T5-NKp46-IL2v: contains from topological N- to C-terminus, IC VH/VL pair, Fc domain dimer that binds CD16, anti-NKp46-1 VH/VL pair, IL2v.
[0652] IC-T6-IC-IL2v: contains from topological N- to C-terminus, IC VH/VL pair, Fc domain dimer mutated to abolish CD16 binding, IC VH/VL pair, IL2v.

[0653] Briefly, CellTraceViolet™ (CTV)-labelled-purified NK cells were cultured with a dose range of NKCE-IL2v from 133 nM to 0.0001 nM for 5 days. NK cell proliferation was evaluated by quantification of the percentage of NK cells showing a diluted CTV signal monitored by flow cytometry.

[0654] Results are shown in FIG. 7 showing % of proliferating NK cells in the absence of tumor cells on the y-axis and concentration of test protein on the x-axis. The CD20-F5-NKp46 that bound CD20, NKp46 and CD16 but lacked the IL2v moiety did not induce proliferation of NK cells, while all the proteins containing the IL2v moiety resulted in strong NK cell proliferation, although with differences in potency. All NK cell engager proteins with NKp46 binding domain and/or wild-type Fc domain (in addition to IL2v) were more potent in inducing NK cell proliferation compared to the IC-T6-IC-IL2v protein that lacked CD16 and NKp46 binding.

### Example 6: NKCE-IL2v Promotes Tumor Cell Killing in a Standard Vitro Cytotoxicity Assay at ET Ratio 10:1

[0655] In this experiment, NK cell engager proteins were assessed for their ability to induce killing of RAJI tumor cells by NK cells from two human donors at effector:target ratio of 10:1 in a standard 4-hour cytotoxicity assay using calcein release as readout.

[0656] The test proteins included in this experiment:
[0657] CD20-T5-NKp46-IL2v3: contains topologically from topological N- to C-terminus, anti-CD20 VH/VL pair, Fc domain dimer that binds CD16, anti-NKp46-1 VH/VL pair, IL-2v3.
[0658] CD20-T5-NKp46-IL2pWT: contains from topological N- to C-terminus, anti-CD20 VH/VL pair, Fc domain dimer that binds CD16, anti-NKp46-1 VH/VL pair, IL-2pWT which is wild-type human IL-2 polypeptide.
[0659] CD20-F5-NKp46: contains from topological N- to C-terminus, anti-CD20 VH/VL pair, Fc domain dimer that binds CD16, anti-NKp46-1 VH/VL pair.
[0660] CD20-T5-IC-IL2v3: contains from topological N- to C-terminus, anti-CD20 VH/VL pair, Fc domain dimer that binds CD16, IC VH/VL pair, IL2v3.
[0661] CD20-T6-NKp46-IL2v: contains from topological N- to C-terminus, anti-CD20 VH/VL pair, Fc domain dimer mutated to abolish CD16 binding, anti-NKp46-1 VH/VL pair.
[0662] IC-T5-NKp46-IL2v: contains from topological N- to C-terminus, IC VH/VL pair, Fc domain dimer that binds CD16, anti-NKp46-1 VH/VL pair, IL2v.
[0663] CD20-T5-NKp46-IL2v: contains from topological N- to C-terminus, anti-CD20 VH/VL pair, Fc domain dimer that binds CD16, anti-NKp46-1 VH/VL pair, IL2v.

[0664] Briefly, purified NK cells were rested overnight in complete medium. Purified NK Cells were then cocultured with Raji tumor cells previously loaded with calcein, in a 10 to 1 ratio. Cells were incubated with test proteins described above (doses from 66 nM to 0.0000006 nM) for 4 h at 37° C., 5.5% CO₂ in incubator.

[0665] Results are shown in FIGS. 8A and 8B, each panel representing one human NK cell donor, showing % specific lysis induced by NK cells on the y-axis and concentration of test protein on the x-axis. The overall results were consistent across the two human donors. The IC-T5-NKp46-IL2v that lacked binding to CD20 on targeted cells did not induce significant cytotoxicity. All of the NK cell engagers that retained the ability to bind both CD16 and NKp46 (in addition to CD20) displayed similarly high potency in terms of EC50 values in induction of NK cell cytotoxicity toward the tumor cells. In contrast, the NK cell engagers that lacked either CD16 or NKp46 binding displayed lower potency. The nature of the IL-2 polypeptide (either wild-type of the mutated IL2v) did not appear to differentially affect NK cell cytotoxicity, and furthermore the presence of IL2, whether as wild-type or IL2v, did not result in improved EC50 values in induction of cytotoxicity compared to the CD20-F5-NKp46 NK cell engager that did not have any IL-2 moiety. However the presence of the IL-2 moiety increased the maximum level of lysis.

### Example 7: NKCE-IL2v Promotes Tumor Cell Killing in a Standard Vitro Cytotoxicity Assay at ET Ratio 2:1

[0666] In this experiment, NK cell engager proteins were assessed for their ability to induce killing of RAJI tumor cells by NK cells from two human donors at effector:target ratio of 2:1 in a standard 4-hour cytotoxicity assay suing Cr⁵¹ as readout.

[0667] The test proteins included in this experiment:
[0668] CD20-T5-NKp46-IL2v: contains from topological N- to C-terminus, anti-CD20 VH/VL pair, Fc domain dimer that binds CD16, anti-NKp46-1 VH/VL pair, IL-2v.
[0669] CD20-F5-NKp46: contains from topological N- to C-terminus, anti-CD20 VH/VL pair, Fc domain dimer that binds CD16, anti-NKp46-1 VH/VL pair.
[0670] CD20-T5-IC-IL2v: contains from topological N- to C-terminus, anti-CD20 VH/VL pair, Fc domain dimer that binds CD16, IC VH/VL pair, IL2v.
[0671] CD20-T6-NKp46-IL2v: contains from topological N- to C-terminus, anti-CD20 VH/VL pair, Fc domain dimer mutated to abolish CD16 binding, anti-NKp46-1 VH/VL pair.
[0672] IC-T6-IC-IL2v: contains from topological N- to C-terminus, IC VH/VL pair, Fc domain dimer mutated to abolish CD16 binding, IC VH/VL pair, IL2v.

[0673] Briefly, purified NK cells were rested overnight in complete medium. Resting NK cells were then cocultured with Raji tumor cells previously loaded with ⁵¹Cr, in a 2 to 1 ratio. Cells were incubated with test proteins described above (doses from 20 to 0.0001 ug/ml) for 4 h at 37° C., 5.5% CO² in incubator.

[0674] Results are shown in FIGS. 8C and 8D each representing one human NK cell donor, showing % specific lysis induced by NK cells on the y-axis and concentration of test protein on the x-axis. The overall results were consistent across the two human donors. The IC-T6-NKp46-IL2v that lacked binding to CD20, CD16 and NKp46 did not induce significant cytotoxicity. All of the NK cell engagers that retained the ability to bind both CD16 and NKp46 (in addition to CD20) displayed strong ability to potentiate NK cell cytotoxicity toward the tumor cells. The NK cell engagers that lacked either CD16 or NKp46 binding displayed lower potency in terms of EC50 values. The CD20-F5-NKp46 NK cell engager which did not have any IL2v moiety was of comparable potency as the CD20-T5-NKp46-IL2v3 NK cell engager, although the latter showed a higher plateau of lysis.

### Example 8: NKCE-IL2v Induce Cytokines when Engaged on Tumor Cells

[0675] In this experiment, NK cell engager proteins were assessed for their ability to induce cytokine production by NK cells when they were co-cultured with RAJI tumor cells at effector:target ratio of 0.5:1. The test was a standard 4-hour cytokine assay in presence of Golgi stop using intracellular flow cytometry as readout.

[0676] The test proteins included in this experiment:
[0677] CD20-T5-NKp46-IL2v: contains from topological N- to C-terminus, anti-CD20 VH/VL pair, Fc domain dimer that binds CD16, anti-NKp46-1 VH/VL pair, IL-2v.
[0678] CD20-F25-NKp46: contains from topological N- to C-terminus, anti-CD20 VH/VL pair, Fc domain dimer that binds CD16, anti-NKp46-1 VH/VL pair.
[0679] CD20-T5-IC-IL2v: contains from topological N- to C-terminus, anti-CD20 VH/VL pair, Fc domain dimer that binds CD16, IC VH/VL pair, IL2v.
[0680] CD20-T6-NKp46-IL2v: contains from topological N- to C-terminus, anti-CD20 VH/VL pair, Fc domain dimer mutated to abolish CD16 binding, anti-NKp46-1 VH/VL pair, IL2v.
[0681] IC-T5-NKp46-IL2v: contains from topological N- to C-terminus, IC VH/VL pair, Fc domain dimer that binds CD16, anti-NKp46-1 VH/VL pair, IL2v.

[0682] Briefly, freshly purified NK cells were cocultured with Raji tumor cells in a 0.5 to 1 ratio. Cells were incubated in presence of Golgi Stop with the test proteins described above (doses from 13 nM to 0.00001 nM) at 37° C., 5.5% CO² in incubator. After 4 h, IFNγ and MIPβ were analysed by intracellular flow cytometry gated on NK cells.

[0683] Results, shown in FIG. 9, show the % of IFN-γ positive NK cells (left) and Medfi of MIP1β on NK cells (right) on the y-axis and the test molecule concentration on the x-axis. The NK cell engager lacking the binding to CD20 on targeted cells did not induce IFN-γ nor MIP1β production. All of the NK cell engagers that retained the ability to bind both CD16 and NKp46 (in addition to CD20) induced the highest levels of IFN-γ and MIP1β at the lower doses of test molecules. In contrast, the NK cell engagers that lacked either CD16 or NKp46 binding displayed lower potency of cytokine production at the lower doses of test molecules. The CD20-T6-NKp46-IL2v which can bind NKp46 but not CD16 was the less efficient at inducing cytokines while the CD20-T5-IC-IL2v which bind CD16 but not NKp46 via its wild-type Fc domain dimer, resulted in high cytokine production at the highest doses of test molecules. The presence of IL2v in the CD20-T5-NKp46-IL2v molecule compared to the CD20-F25-NKp46 NK cell engager that did not have any IL-2 moiety seems to slightly increase the ability of NK cells to produce these cytokines.

### Example 9: NKCE-IL2v has Strong Anti-Tumor Efficacy In Vivo

[0684] In this experiment, a single injection of NK cell engager protein CD20-T5-NKp46-IL2v (containing from N- to C-terminus, anti-CD20 VH/VL pair, wild-type Fc domain dimer that binds CD16 (not comprising mutations to decrease CD16 binding), anti-NKp46 VH/VL pair that binds the Mus musculus NKp46, IL2v) was assessed for its in vivo anti-tumor activity in a murine model of human cancer.

[0685] The NK cell engager protein was compared to the commercial gold standard Fc-enhanced anti-CD20 antibody obinutuzumab. Briefly, CB17-SCID mice were engrafted subcutaneously by 5×10⁶ RAJI cells in matrigel. 9 days after engraftment, mice were treated with a single intravenous injection of different doses of CD20-T5-NKp46-IL2v (70 ug, 10 ug, 2 ug and 0.4 ug), different doses of obinutuzumab (1500 ug, 150 ug, 50 ug and 15 ug) and PBS as vehicle. Tumor growth was followed over time.

[0686] Results are shown in FIG. 10. The CD20-T5-NKp46-IL2v NK cell engager protein that bound CD20, NKp46, CD16A and CD122 (right panel) showed strong efficacy as a single injection, compared to obinutuzumab (left panel) which displayed limited activity in this model. The 10 μg dose of CD20-T5-NKp46-IL2v resulted in anti-tumor activity which prevented tumor growth past 40 mm³ in volume for about 20 days. The 70 μg dose of CD20-T5-NKp46-IL2v resulted in very strong anti-tumor activity, in which tumors did not grow past 40 mm³ in volume for the duration of the study.

### Example 10: NKCE-IL2v has Strong Anti-Tumor Efficacy In Vivo Against Large Volume Tumors

[0687] In this experiment, weekly treatment with NK cell engager protein CD20-T5-NKp46-IL2v (containing from N- to C-terminus, anti-CD20 VH/VL pair, Fc domain dimer that binds CD16, anti-NKp46 VH/VL pair, IL2v) was assessed for its in vivo anti-tumor activity in a murine model of human cancer in which tumors were allowed to grow to a large volume of 300 m³ before treatment.

[0688] Briefly, CB17-SCID mice were engrafted subcutaneously by 5×10⁶ RAJI cells in matrigel. 11 days after engraftment, when tumors reach a mean volume of 280 mm³, mice were treated with weekly repeated intravenous injections of 25 ug of CD20-T5-NKp46-IL2v or PBS as control vehicle. Tumor growth was followed over time.

[0689] Results are shown in FIG. 11. The CD20-T5-NKp46-IL2v NK cell engager protein that bound CD20, NKp46, CD16A and CD122 (right panel) showed strong efficacy as a weekly injection starting at day 11 post tumor engraftment. The 25 μg dose of CD20-T5-NKp46-IL2v resulted in very strong and long anti-tumor activity, in which tumors first decreased in volume and then generally stayed below 300 mm³ in volume for the duration of the study. In comparison, in the vehicle control group, tumor rapidly grew past 300 mm³ in volume in the days following tumor engraftment. The experiment showed that the CD20-T5-NKp46-IL2v molecule was efficient to control large volume tumor on a long period of time.

### Example 11: Both NKp46 and IL2v are Required for Strong Efficacy In Vivo

[0690] In this experiment, treatment with two injections of different NK cell engager proteins was assessed for their in vivo anti-tumor activity in a murine model of human cancer. The proteins tested were:
[0691] CD20-T5-NKp46-IL2v, containing from N- to C-terminus, anti-CD20 VH/VL pair, Fc domain dimer that binds CD16, anti-NKp46 VH/VL pair that bind to NKp46 from Mus musculus, IL-2v.
[0692] CD20-T5-IC-IL2v which lacks NKp46 binding,
[0693] CD20-F5-NKp46 which lacks CD122 binding.
[0694] PBS was injected as vehicle and negative control.

[0695] Briefly, CB17-SCID mice were engrafted subcutaneously by 5×10⁶ RAJI cells in matrigel. Mice were treated by 2 intravenous injections of 25 ug of CD20-T5-NKp46-IL2v, 25 ug of CD20-T5-IC-IL2v, 25 ug of CD20-F5-NKp46 or PBS as control vehicle at day 9 and day 16 after tumor cell engraftment. Tumor growth was followed over time.

[0696] Results are shown in FIG. 12. The CD20-T5-NKp46-IL2v NK cell engager protein that binds CD20, NKp46, CD16A and CD122 showed strong efficacy as two injections separated by a one week, starting at day 9 post tumor engraftment when tumors had grown to 60 mm³ in volume. The 25 μg dose of CD20-T5-NKp46-IL2v resulted in very strong anti-tumor activity, in which tumors generally stayed in the range of 60 mm³ in volume for the duration of the study. In comparison, in the CD20-T5-IC-IL2v group and in the CD20-F5-NKp46, tumors were somewhat initially controlled during week after treatment but then rapidly grew past 300 mm³ in volume thereafter. The experiments show that both NKp46 and CD122 binding are important to efficient control tumor growth and their simultaneous targeting drives the strong antitumor efficacy of the CD20-T5-NKp46-IL2v molecule.

### Example 12: NKCE-IL2v Induces NK Cell Accumulation and an Inflammatory Microenvironment in Solid Tumor

[0697] In this experiment, we tested the ability of the NK cell engagers CD20-F5-NKp46 and CD20-T5-NKp46-IL2v to induce NK cell accumulation in tumors, in an in vivo murine model of human cancer. The molecules tested were:
[0698] CD20-T5-NKp46-IL2v: contains from N- to C-terminus, anti-CD20 VH/VL pair, Fc domain dimer that binds CD16, anti-mouse NKp46-1 VH/VL pair, IL-2v.
[0699] CD20-F5-NKp46: contains from N- to C-terminus, anti-CD20 VH/VL pair, Fc domain dimer that binds CD16, anti-mouse NKp46-1 VH/VL pair.
[0700] Obinutuzumab.

[0701] Briefly, CB17-SCID mice were engrafted subcutaneously by 5×10⁶ RAJI cells in matrigel. 20 days after Raji cell engraftment, mice were treated by a single intravenous injections of 70 ug of CD20-T5-NKp46-IL2v, 125 ug of CD20-F5-NKp46, 600 ug of obinutuzumab and PBS as control vehicle. After 3 days, tumors were harvested for RNA extraction. cDNA were prepared from whole tumor mRNA extract and qPCR performed to quantify ncr1 and ifn-γ (ifng) transcript expression to evaluate NK cells infiltrate and activation in the tumor. Results are shown in FIG. 13. Tumors harvested from mice treated by the CD20-T5-NKp46-IL2v NK cell engager protein that bound CD20, NKp46, CD16A and CD122 showed high expression of the ncr1 transcript (encoding for NKp46 protein and highly specific for NK cells), demonstrating an increase of NK cell infiltration in tumor. In comparison, tumors harvested in mice treated by the CD20-F5-NKp46 protein or obinutuzumab showed only minor increase of ncr1 transcripts revealing a much lower NK cell infiltrate in tumors. Furthermore, tumors harvested from mice treated by the CD20-T5-NKp46-IL2v NK cell engager protein showed higher expression of the ifng transcript compare to other treated conditions. Tumors harvested in mice treated by the CD20-F5-NKp46 which lacks CD122 binding also showed a lower but significant increase of ifng transcripts compare to tumors from obinutuzumab or PBS injected mice. The results show that CD20-T5-NKp46-IL2v proteins promote NK cell recruitment and activation in the targeted tumors.

### Example 13: NK Cells Drive NKCE-IL2v Efficacy to Control Solid Tumor Growth

[0702] In this experiment, we assessed the effect of in vivo depletion of NK cells on the ability of the NK cell engager CD20-T5-NKp46-IL2v to control tumor cell growth in an in vivo murine model of human cancer.

[0703] Briefly, CB17-SCID mice were engrafted subcutaneously by 5×10⁶ RAJI cells in matrigel. Mice were injected with 25 ug CD20-T5-NKp46-IL2v at day 10 when tumors had reached 70 mm³, followed by a second injection one week later. NK depletion was carried out by injection of anti-Asialo GM1 antibody, administered once a week, starting at day 9 (before treatment) and repeated for a total of six administrations. Tumor growth was followed over time.

[0704] Results are shown in FIG. 14. The upper right hand panel shows that treatment with the CD20-T5-NKp46-IL2v NK cell engager controlled tumor growth. However, NK cell depletion resulted in a loss of control of tumor growth by about day 30 (lower right hand panel) while tumor are still controlled in mice not depleted for NK cells. These data show that NK cells are important for the antitumor activity induced by the CD20-T5-NKp46-IL2v NK cell engager.

### Example 14: NKCE-IL2v Molecules with Different Linker Length

[0705] In view of the potential effect of domain positioning within the NKCE on the ability to simultaneously bind each of NKp46, CD16 and CD122 on NK cells, we sought to investigate the effect of different structural modifications in the NKCE-IL2v proteins on their ability to induce IL-2R signaling.

[0706] A series of different heterotrimeric proteins were compared that all bound tumor antigen (CD20, indicated interchangeable also as “GA101” referring to the anti-CD20 VH/VL pair), CD16 (by inclusion of a dimeric wild-type Fc domain), NKp46 and CD122 (by inclusion of an IL2v molecule). In one series of proteins, exemplified by GA101-T5-NKp46-IL2v, the NKp46-binding domain (as a Fab) was placed at the C-terminus of the Fc domain dimer, and the IL2v was placed at the C-terminus of the NKp46-binding Fab (domain arrangement of the NKp46, Fc and IL2v moieties, from N- to C-terminus: dimeric Fc-anti-NKp46 Fab-IL2v). The length of the flexible domain linker separating IL2v from the NKp46-binding domain was varied, including a short linker of 5 amino acid residues, the 10 amino acid residue linker of GA101-T5-NKp46-IL2v, and a long linker of 15 amino acid residues.

[0707] The proteins tested were:
[0708] Recombinant human IL-2
[0709] CD20-T5-NKp46-IL2v
[0710] CD20-T5-NKp46-IL2v Short Linker
[0711] CD20-T5-NKp46-IL2v Long Linker

[0712] Briefly, 1M/well of purified PBMC were seeded in 96-well plate and treated with increasing doses of various NKCE-IL2v (dose from 133 nM to 0.0000013 nM) for 20 min at 37° C., 5.5% CO² in incubator. STAT5 phosphorylation was then analyzed by flow cytometry on NK cells (gated on CD3− CD56+), CD4 T cells (CD3+ CD4+ FoxP3−), CD8 T cells (CD3+ CD8+) and Treg cells (CD3+ CD4+ CD25hi FoxP3+).

[0713] Results are shown in FIG. 15 showing % of pSTAT5 cells among PBMC on the y-axis and concentration of test protein on the x-axis. All the GA101-T5-NKp46-IL2v NK cell engager proteins induced potent IL2R signaling preferentially in NK cells over TReg cells, CD8 T cells and CD4 T cells whatever the length of the linker used.

### Example 15: NKCE-IL2v Binding to Distant Epitopes on NKp46 Retain Strong Ability to Induce Cytotoxicity

[0714] This experiment was to investigate the effect of different structural modifications in the NKCE-IL2v proteins on their ability to potentiate the cytotoxicity of NK cells toward target cells. In this experiment, NK cell engager proteins were assessed for their ability to induce killing of RAJI tumor cells by resting purified NK cells at effector:target ratio of 10:1 in a standard 4-hour cytotoxicity assay suing Cr⁵¹ as readout. In this series of experiments, we tested different domain positioning within the multispecific protein, different lengths of domain linkers separating the IL2v moiety from the rest of the multispecific protein, and different NKp46 binding domains that bind to distant sites on the NKp46 molecule.

[0715] In addition to the multispecific proteins described in Examples 2-14 which all made use of NKCE proteins which incorporated the NKp46-1 VH/VL pair, additional CD20-binding NKCE proteins in the CD20-T5-NKp46-4-IL2v were tested that incorporated instead the NKp46-4 VH/VL pair. As shown in epitope mapping experiments and in Gauthier et al. 2019 (Cell 177:1701-1713), while the NKp46-1 antibody binds to an epitope on NKp46 located at the transition between domains 1 and 2, the NKp46-4 antibody binds to an epitope on the N-terminal part of the D1 domain of NKp46.

[0716] Three-dimensional modelling of the binding to the N-terminal part of NKp46 suggested that in such a setting the anti-NKp46-4 VH/VL pair would be positioned closer to the cell membrane compared to the NKp46-1 VH/VL pair, and that such binding might impair the ability of the IL2v moiety to interact with CD122 whose IL-2 binding site is positioned about 70 Angstroms from the cell surface (see FIG. 1C). Consequently, the CD20-T5-NKp46-4-IL2v was produced with three different lengths for the flexible domain linker separating IL2v from the NKp46-binding domain, including a short linker of 5 amino acid residues, a standard 10 amino acid residue linker, and a long linker of 15 amino acid residues.

[0717] The proteins tested were:
[0718] CD20-T5-NKp46-1-IL2v
[0719] CD20-T5-NKp46-1-IL2v Short Linker
[0720] CD20-T5-NKp46-1-IL2v Long Linker
[0721] CD20-T6-NKp46-1-IL2v
[0722] IC-T6-NKp46-1-IL2v
[0723] IC-T5-NKp46-1-IL2v
[0724] CD20-T5-NKp46-4-IL2v
[0725] CD20-T5-NKp46-4-IL2v Short Linker
[0726] CD20-T5-NKp46-4-IL2v Long Linker

[0727] Results are shown in FIGS. 16, and 17 showing % specific lysis on the y-axis and concentration of test protein on the x-axis. FIG. 16 shows cytotoxicity potentiated by the NKCE proteins in the “T5” and “T6” formats in which the NKp46-binding domain based on the NKp46-1 VH/VL pair is positioned between the wild-type Fc domain dimer and the C-terminal IL2v, with 10 amino linker, short (5 aa) linker or long (15 aa) linker; the proteins were all comparable in their ability to potentiate NK cell cytotoxicity towards tumors cells, without negative impact on NK cytotoxicity by the shorter or longer linkers.

[0728] FIG. 17 shows cytotoxicity potentiated by the NKCE proteins in the “T5” and “T6” formats in which the NKp46-binding domain based on the NKp46-4 VH/VL pair is positioned between the wild-type Fc domain dimer and the C-terminal IL2v, with 10 amino linker, short (5 aa) linker or long (15 aa) linker; the proteins were all comparable in their ability to potentiate NK cell cytotoxicity towards tumors cells. The NKp46 binding site targeted by the NKCE protein therefore does not impact ability cytotoxicity.

[0729] FIG. 18 shows the structure of the proteins tested in FIGS. 16, 17 and 18.

### Example 16: Different Cytokine Variants do not Negatively Affect IL2R Signaling Induced by NKCE-IL2v

[0730] The IL2v moiety used in NKCE proteins of Examples 2-16, together with a new IL2v moiety referred to as IL2v3, was chosen in order to confer preference for binding to IL-2Rβ on NK cells over IL-2Rα on T cells, including Tregs. This experiment was to investigate the effect of different structural modifications in the cytokine proteins on their ability to affect IL2R signaling induced by NKCE-IL2v.

[0731] Different NKCE-IL2v proteins were prepared in which the IL2v amino acid sequence was varied, however while maintaining a preferential binding to the NK-expressed receptor chain (IL-2Rβ) over the Treg cell expressed chain (IL-2Rα). The NKCE proteins were then tested for the ability to differentially induce IL2R in NK cells over T cells, to assess whether different cytokine variants will affect the selective targeting of IL-2Rβ over the high affinity IL-2Rαβγ complex.

[0732] Three IL-2 mutant polypeptides were produced and placed C-terminally on the NKCE-IL2v protein, as follows:
[0733] CD20-T5-NKp46-IL2v: contains from N- to C-terminus, anti-CD20 VH/VL pair, Fc domain dimer that binds CD16, anti-NKp46-1 VH/VL pair, IL2v (mutations T3A, C125A, F42A, Y45A and L72G with reference to the mature wild-type human IL-2).
[0734] CD20-T5-NKp46-IL2v2: contains from N- to C-terminus, anti-CD20 VH/VL pair, Fc domain dimer that binds CD16, anti-NKp46-1 VH/VL pair, IL2v2 (mutations R38A/F42K with reference to the mature wild-type human IL-2).
[0735] CD20-T5-NKp46-IL2v3: contains from N- to C-terminus, anti-CD20 VH/VL pair, Fc domain dimer that binds CD16, anti-NKp46-1 VH/VL pair, IL2v3 (mutations R38A/T41A/F42K with reference to the mature wild-type human IL-2).

[0736] Briefly, 1M/well of purified PBMC were seeded in 96-well plate and treated with increasing doses of various NKCE-IL2v (dose from 133 nM to 0,0000013 nM) for 20 min at 37° C., 5.5% CO2 in incubator. STAT5 phosphorylation was then analyzed by flow cytometry on PBMC and gated on NK cells (CD3−CD56+), CD8 T cells (CD3+ CD8+), CD4 T cells (CD3+ CD4+ FoxP3−) and Tregs (gated on CD3+ CD4+ CD25+FoxP3+).

[0737] Results are shown in FIG. 19 showing % of pSTAT5 cells among PBMC cells on the y-axis and concentration of test protein on the x-axis. The CD20-T5-NKp46-IL2v, CD20-T5-NKp46-IL2v2 and CD20-T5-NKp46-IL2v3 were comparable and each resulted in an approximately 2-log increase in percent of pSTAT5+ cells among the NK cells, compared to IC-T6-IC-IL2 (IL2pWT) that contained wild-type IL-2 and did not bind NKp46 or CD16A. The CD20-T5-NKp46-IL2v protein therefore permitted a selective activation of NK cells over Treg cells, CD4 T cells and CD8 T cells. Substitution of different “not-alpha” cytokine variants does not impact ability of the NKCE-IL2v protein to selectively activate NK cells over Treg cells, CD4 T cells and CD8 T cells. EC50 values for activation of NK cells and Tregs are shown below.

| % pSTAT5 nM | EC50 NK cells | EC50 Tregs |
|---|---|---|
| IL2pWT | 0.6 | 0.002 |
| IL2v | 0.013 | 1.8 |
| IL2v2 | 0.011 | 0.73 |
| IL2v3 | 0.010 | 0.7 |

### Example 17: NKCE-IL2v Induces Minimal Systemic Cytokine Release In Vivo in Mice

[0738] In this experiment, we assessed the effect on systemic cytokine release of treatment with the NK cell engager CD20-T5-NKp46-IL2v in mice. CB17 SCID mice were injected with a single injection of either 25 μg or 70 μg of CD20-T5-NKp46-IL2v, with four mice per dose level. Murine IL-6 and TNFα production in plasma was monitored over time for 14 days.

[0739] Results are shown in FIG. 20, with the left panel showing IL-6 production and the right panel showing TNFα production. For each time point post treatment (D indicates days), the left bar shows plasma concentration of cytokine for the 70 μg dose and the right bar shows plasma concentration of cytokine for the 25 μg dose. FIG. 10 shows that treatment with the CD20-T5-NKp46-IL2v NK cell engager controlled tumor growth using single injection of doses over 10 ug. These data show that the CD20-T5-NKp46-IL2v induced only minimal systemic cytokine production during the 3 days following treatment, and without systemic cytokine production thereafter, suggesting that the CD20-T5-NKp46-IL2v does not involve immune toxicity, despite the treatment being at doses where it displays potent anti-tumor and NK cell cytotoxicity activity.

### Example 18: Mechanism of Action of Tumor Antigen, NKp46 and CD16 Binding Components of NKCE Proteins

[0740] These experiments are shown in order to illustrate the role of NKp46 and CD16A on NK cells in the mechanism of action of the NKCE proteins, in the absence of inclusion of the cytokine moiety. Different NKCE protein formats were produced that either had low or substantially lack of binding to FcγR (including CD16) or which had binding to FcγRs (including CD16), e.g. the binding affinity to human CD16 was within 1-log of that of wild-type human IgG1 antibodies, as assessed by SPR.

[0741] Different constructs were made for use in the preparation of a multispecific protein using the variable domains DNA and amino acid sequences derived from the scFv specific for tumor antigen CD19 described and different variable regions from antibodies specific for NKp46. Proteins were cloned, produced and purified as in PCT publication no. WO2016/207273. Domains structures are shown in FIGS. 21A and 21B for the different formats.

[0742] Format 2 (F2): CD19-F2-NKp46-3

[0743] The domain structure of F2 polypeptides having a monomeric Fc domain and therefore not binding CD16 is shown in FIG. 21A. The DNA and amino acid sequences for the monomeric CH2-CH3 Fc portion contains CH3 domain mutations (EU numbering) L351K, T366S, P395V, F405R, T407A and K409Y to prevent CH3 heterodimerization. The heterodimer is made up of:
[0744] (1) a first (central) polypeptide chain having domains arranged as follows (N- to C-termini):

(Vκ-VH)^{anti-CD19}-CH2-CH3-V_{H}^{anti-NKp46}-CH1

and
[0745] (2) a second polypeptide chain having domains arranged as follows (N- to C-termini): VK^{anti-NKp46}-CK.

[0746] The (VK-VH) unit was made up of a VH domain, a linker and a VK unit (i.e. an scFv). As with other formats of the bispecific polypeptides, the DNA sequence coded for a CH3/VH linker peptide having the amino acid sequence STGS designed in order to insert a specific SalI restriction site at the CH3-VH junction. Proteins were cloned, produced and purified as in Example 2-1. The amino acid sequences for the CD19-F2-NKp46-3 Polypeptide chain 1 is shown in SEQ ID NO: 221 and CD19-F2-NKp46-3 Polypeptide chain 2 in SEQ ID NO: 222.

[0747] Format 5 (F5): CD19-F5-NKp46-3

[0748] The domain structure of the trimeric F5 polypeptide is shown in FIG. 21A, wherein the interchain bonds between hinge domains (indicated in the figures between CH1/Cκ and CH2 domains on a chain) and interchain bonds between the CH1 and Cκ domains are interchain disulfide bonds. The heterotrimer is made up of:
[0749] (1) a first (central) polypeptide chain having domains arranged as follows (N- to C-termini):

V_{H}^{anti-CD19}-CH1-CH2-CH3-V_{H}^{anti-NKp46}-Cκ

and
[0750] (2) a second polypeptide chain having domains arranged as follows (N- to C-termini):

Vκ^{anti-CD19}-CK-CH2-CH3

and
[0751] (3) a third polypeptide chain having domains arranged as follows (N- to C-termini):

Vκ^{anti-NKp46}-CH1.

[0752] The amino acid sequences of the three chains are shown in SEQ ID NOS: 223 (chain 2), 224 (chain 1) and 225 (chain 3).

[0753] Format 6 (F6): CD19-F6-NKp46-3

[0754] The F6 protein is the same as F5, but contains a N297S substitution to avoid N-linked glycosylation. The amino acid sequences of the three chains of the F6 protein are shown in SEQ ID NOS: 226 (chain 2), 227 (chain 1) and 228 (chain 3).

[0755] Format 7 (F7): CD19-F7-NKp46-3

[0756] The domain structure of heterotrimeric F7 polypeptides is shown in FIG. 21A. The F7 protein is the same as F6, except for cysteine to serine substitutions in the CH1 and Cκ domains that are linked at their C-termini to Fc domains, in order to prevent formation of a minor population of dimeric species of the central chain with the Vκ^{anti-NKp46}-CH1 chain. The amino acid sequences of the three chains of the 76 protein are shown in SEQ ID NOS: 229 (chain 2), 230 (chain 1) and 231 (chain 3).

[0757] Format 13 (F13): CD19-F13-NKp46-3

[0758] The domain structure of the dimeric F13 polypeptide is shown in FIG. 21A, wherein the interchain bonds between hinge domains (indicated between CH1/Cκ and CH2 domains on a chain) and interchain bonds between the CH1 and Cκ domains are interchain disulfide bonds. The heterodimer is made up of:
[0759] (1) a first (central) polypeptide chain having domains arranged as follows (N- to C-termini):

V_{H}^{anti-CD19}-CH1-CH2-CH3-(V_{H}-Vκ)^{anti-NKp46}

and
[0760] (2) a second polypeptide chain having domains arranged as follows (N- to C-termini):

Vκ^{anti-CD19}-Cκ-CH2-CH3.

[0761] The (V_{H}-Vκ) unit was made up of a V_{H} domain, a linker and a Vκ unit (scFv).

[0762] The amino acid sequences of the two chains of the F13 protein are shown in SEQ ID NOS: 232 and 233.

[0763] Format 14 (F14): CD19-F14-NKp46-3

[0764] The domain structure of the dimeric F14 polypeptide is shown in FIG. 21B. The F14 polypeptide is a dimeric polypeptide which shares the structure of the F13 format, but instead of a wild-type Fc domain (CH2-CH3), the F14 bispecific format has CH2 domain mutations N297S to abolish N-linked glycosylation. The amino acid sequences of the two chains of the F14 protein are shown in SEQ ID NOS: 234 and 235.

### NKp46 Binding Affinity Determination by Surface Plasmon Resonance (SPR)

### Biacore T100 General Procedure and Reagents

[0765] SPR measurements were performed on a Biacore T100 apparatus (Biacore GE Healthcare) at 25° C. In all Biacore experiments HBS-EP+ (Biacore GE Healthcare) and NaOH 10 mM served as running buffer and regeneration buffer respectively. Sensorgrams were analyzed with Biacore T100 Evaluation software. Protein-A was purchased from (GE Healthcare). Human NKp46 recombinant proteins were cloned, produced and purified at Innate Pharma.

### Immobilization of Protein-A

[0766] Protein-A proteins were immobilized covalently to carboxyl groups in the dextran layer on a Sensor Chip CM5. The chip surface was activated with EDC/NHS (N-ethyl-N′-(3-dimethylaminopropyl) carbodiimidehydrochloride and N-hydroxysuccinimide (Biacore GE Healthcare)). Protein-A was diluted to 10 μg/ml in coupling buffer (10 mM acetate, pH 5.6) and injected until the appropriate immobilization level was reached (i.e. 2000 RU). Deactivation of the remaining activated groups was performed using 100 mM ethanolamine pH 8 (Biacore GE Healthcare).

### Binding Study

[0767] Antibodies were next tested as different formats having the anti-NKp46 variable regions from the NKp46-3 antibody, and were compared to the NKp46-3 antibody as a full-length human IgG1. Bispecific proteins at 1 μg/mL were captured onto Protein-A chip and recombinant human NKp46 proteins were injected at 5 μg/mL over captured bispecific antibodies. For blank subtraction, cycles were performed again replacing NKp46 proteins with running buffer. For FACS screening, the presence of reactive antibodies in the supernatants was detected using Goat anti-mouse polyclonal antibody (pAb) labeled with PE.

### Affinity Study

[0768] Monovalent affinity study was conducted following a regular Capture-Kinetic protocol as recommended by the manufacturer (Biacore GE Healthcare kinetic wizard). Seven serial dilutions of human NKp46 recombinant proteins, ranging from 6.25 to 400 nM were sequentially injected over the captured Bi-Specific antibodies and allowed to dissociate for 10 min before regeneration. The entire sensorgram sets were fitted using the 1:1 kinetic binding model.

### Results

[0769] All of the formats tested retained binding to NKp46 when using the NKp46-3 variable regions. Monovalent affinities and kinetic association and dissociation rate constants are shown below in Table 7 below.

TABLE 7

| Bispecific mAb | ka (1/Ms) | kd (1/s) | KD (M) |
|---|---|---|---|
| CD19-F5-NKp46-3 | 7.555E+4 | 0.00510 | 67E−09 |
| CD19-F6-NKp46-3 | 7.934E+4 | 0.00503 | 63E−09 |
| CD19-F13-NKp46-3 | 8.300E+4 | 0.00565 | 68E−09 |
| CD19-F14-NKp46-3 | 8.826E+4 | 0.00546 | 62E−09 |
| NKp46-3 IgG1 | 2.224E+5 | 0.00433 | 20E−09 |

Comparative Efficacy with Depleting Anti-Tumor mAbs: NKp46×CD19 Bispecific Proteins at Low ET Ratio

[0770] These studies aimed to investigate whether NKCE proteins can mediate NKp46-mediated NK cell activation toward cancer target cells at low effector:target ratios. The ET ratio used in this Example was 1:1 which is believed to be closer to the setting that would be encountered in vivo. NKp46×CD19 bispecific proteins having an arrangement according to the F2 format (lacking CD16A binding) with anti-NKp46 variable domains from NKp46-1, NKp46-2, NKp46-3, NKp46-4 or NKp46-9 were compared to:
[0771] (a) full-length monospecific anti-NKp46 antibodies (NKp46-3 as human IgG1), and
[0772] (b) the anti-CD19 antibody as a full-length human IgG1 as ADCC inducing antibody control comparator.

[0773] The experiments further included as controls: rituximab (an anti-CD20 ADCC inducing antibody control for a target antigen with high expression levels); anti-CD52 antibody alemtuzumab (a human IgG1, binds CD52 target present on both targets and NK cells), and negative control isotype control therapeutic antibody (a human IgG1 that does not bind a target present on the target cells (HUG1-IC). The different proteins were tested for functional effect on NK cell activation as assessed by CD69 or CD107 expression in the presence of CD19-positive tumor target cells (Daudi cells), in the presence of CD19-negative, CD16-positive target cells (HUT78 T-lymphoma cells), and in the absence of target cells.

[0774] NK activation was tested by assessing CD69 and CD107 expression on NK cells by flow cytometry. The assay was carried out in 96 U well plates in completed RPMI, 150 μL final/well. Effector cells were fresh NK cells purified from donors. Target cells were Daudi (CD19-positive), HUT78 (CD19-negative) or K562 (NK activation control cell line). In addition to K562 positive control, three conditions were tested, as follows:
[0775] NK cell alone
[0776] NK cells vs Daudi (CD19+)
[0777] NK cells vs HUT78 (CD19-)

[0778] Effector:Target (E:T) ratio was 1:1, with an antibody dilution range starting to 10 μg/mL with 1/4 dilution (n=8 concentrations). Antibodies, target cells and effector cells were mixed; spun 1 min at 300 g; incubated 4 h at 37° C.; spun 3 min at 500 g; washed twice with Staining Buffer (SB); added 50 μL of staining Ab mix; incubated 30 min at 300 g; washed twice with SB resuspended pellet with CellFix; stored overnight at 4° C.; and fluorescence detected with Canto II (HTS).

[0779] Results

[0780] The results of the above experiments are shown in FIG. 22 (22A: CD107 and 22B: CD69). In the presence of target-antigen expressing cells, each of the bispecific anti-NKp46×anti-CD19 antibodies (respectively including NKp46-1, NKp46-2, NKp46-3, NKp46-4 or NKp46-9 variable regions) activated NK cells in the presence of Daudi cells.

[0781] The activation induced by bispecific anti-NKp46×anti-CD19 antibody in the presence of Daudi cells was far more potent than that elicited by the full-length human IgG1 anti-CD19 antibody. This ADCC inducing antibody had low activity in this setting. Furthermore, in this low E:T ratio setting the activation induced by the NKCE was as potent as the anti-CD20 antibody rituximab, with a difference being observed only at the highest concentrations that were 10 fold higher than concentrations in which differences were observed at the 2.5:1 ET ratio.

[0782] In the absence of target cells or in the presence of target antigen-negative HUT78 cells, full-length anti-NKp46 antibodies and alemtuzumab showed a similar level of baseline activation as was observed in the presence of Daudi cells. Anti-NKp46×anti-CD19 antibody did not activate NK cells in presence of HUT78 cells.

Combining NKp46 and CD16 triggering

[0783] NKp46×CD19 NKCE proteins that bind human CD16 having an arrangement according to the F5 format with anti-NKp46 variable domains from NKp46-3 were compared to the same bispecific antibody in a F6 format (which lacks CD16 binding), and to a human IgG1 isotype anti-CD19 antibody, as well as to a human IgG1 isotype control antibody for functional ability to direct purified NK cells to lyse CD19-positive Daudi tumor target cells.

[0784] Briefly, the cytolytic activity of fresh human purified NK cells from EFS Buffy Coat was assessed in a classical 4-h ⁵¹Cr-release assay in U-bottom 96 well plates. Daudi or HUT78 cells (negative control cells that do not express CD19) were labelled with ⁵¹Cr and then mixed with NK cells at an effector/target ratio equal to 10:1, in the presence of test antibodies at dilution range starting from 10 μg/ml with 1/10 dilution (n=8 concentrations).

[0785] After brief centrifugation and 4 hours of incubation at 37° C., 50 μL of supernatant were removed and transferred into a LumaPlate (Perkin Elmer Life Sciences, Boston, MA), and ⁵¹Cr release was measured with a TopCount NXT beta detector (PerkinElmer Life Sciences, Boston, MA). All experimental conditions were analyzed in triplicate, and the percentage of specific lysis was determined as follows: 100×(mean cpm experimental release−mean cpm spontaneous release)/(mean cpm total release−mean cpm spontaneous release). Percentage of total release is obtained by lysis of target cells with 2% Triton X100 (Sigma) and spontaneous release corresponds to target cells in medium (without effectors or Abs).

[0786] The results of these experiments are shown in FIG. 23. The CD19-F6-NKp46 (bispecific protein in F6 format) whose Fc domain does not bind CD16 due to a N297 substitution was as potent in mediating NK cell lysis of Daudi target cells as the full-length IgG1 anti-CD19 antibody. This result is remarkable especially considering that the control IgG1 anti-CD19 antibody binds CD19 bivalently and further since the anti-CD19 antibody is bound by CD16. The F6 protein was also compared to a protein CD19-F5-NKp46 that was identical to the CD19-F6-NKp46 protein with the exception of an asparagine at Kabat residue 297. Despite the strong NK activation mediated by CD16 triggering by the CD19-F5-NKp46 (F5 format protein) whose Fc domain binds CD16, the F5 format was far more potent in mediating Daudi target cell lysis that the full-length IgG1 anti-CD19 antibody or the F6 format bispecific protein. This suggests that NKp46 can enhance target cell lysis even when CD16 is triggered. In fact, at comparable levels of target cell lysis, the CD19-F5-NKp46 was at least 1000 times more potent than the full-length anti-CD19 IgG1.

### Binding of Different Bispecific Formats to FcRn

[0787] The affinity of different antibody formats for human FcRn was studied by Surface Plasmon Resonance (SPR) by immobilizing recombinant FcRn proteins covalently to carboxyl groups in the dextran layer on a Sensor Chip CM5, as described in PCT publication no. WO2016/207273. A chimeric full length anti-CD19 antibody having intact human IgG1 constant regions and NKp46×CD19 NKCE with anti-NKp46 variable domains from NKp46-3 were tested; for each analyte, the entire sensorgram was fitted using the steady state or 1:1 SCκ binding model.

[0788] The results of these experiments are shown in Table 8 below. The NKCE proteins having Fc domain dimers (formats F5, F6, F13, F14) bound to FcRn with affinity similar to that of the full-length IgG1 antibody. Other NKCE proteins with monomeric Fc domains (F3, F4, F9, F10, F11, not shown below) also displayed binding affinity to FcRn, however with lower affinity that the bispecific proteins having Fc domain dimers.

TABLE 8

| Antibody/Bispecific | SPR method | KD nM |
|---|---|---|
| Human IgG1/K Anti- | SCK/Two state | 7.8 |
| CD19 | reaction | |
| CD19-F5-NKp46-3 | SCK/Two state | 2.6 |
| | reaction | |
| CD19-F6- NKp46-3 | SCK/Two state | 6.0 |
| | reaction | |
| CD19-F13- NKp46-3 | SCK/Two state | 15.2 |
| | reaction | |
| CD19-F14- NKp46-3 | SCK/Two state | 14.0 |
| | reaction | |

### Binding to FcγR

[0789] Different multimeric Fc proteins were evaluated to assess whether such bispecific monomeric Fc proteins could retain binding to Fcγ receptors.

[0790] SPR measurements were performed on a Biacore T100 apparatus (Biacore GE Healthcare) at 25° C. In all Biacore experiments HBS-EP+ (Biacore GE Healthcare) and 10 mM NaOH, 500 mM NaCl served as running buffer and regeneration buffer respectively. Sensorgrams were analyzed with Biacore T100 Evaluation software. Recombinant human FcR's (CD64, CD32a, CD32b, CD16a and CD16b) were cloned, produced and purified.

[0791] F5 and F6 NKCE proteins CD19-F5-NKp46-3 or CD19-F6-NKp46-3 were immobilized covalently to carboxyl groups in the dextran layer on a Sensor Chip CM5. The chip surface was activated with EDC/NHS (N-ethyl-N′-(3-dimethylaminopropyl) carbodiimidehydrochloride and N-hydroxysuccinimide (Biacore GE Healthcare)). Bispecific antibodies were diluted to 10 μg/ml in coupling buffer (10 mM acetate, pH 5.6) and injected until the appropriate immobilization level was reached (i.e. 800 to 900 RU). Deactivation of the remaining activated groups was performed using 100 mM ethanolamine pH 8 (Biacore GE Healthcare).

[0792] Monovalent affinity study was assessed following a classical kinetic wizard (as recommended by the manufacturer). Serial dilutions of soluble analytes (FcRs) ranging from 0.7 to 60 nM for CD64 and from 60 to 5000 nM for all the other FcRs were injected over the immobilized bispecific antibodies and allowed to dissociate for 10 min before regeneration. The entire sensorgram sets were fitted using the 1:1 kinetic binding model for CD64 and with the Steady State Affinity model for all the other FcRs.

[0793] The results showed that while full length wild type human IgG1 bound to all cynomolgus and human Fcγ receptors, the CD19-F6-NKp46-3 bi-specific antibodies did not bind to any of the receptors. The CD19-F5-NKp46-3, on the other hand, bound to each of the human receptors CD64 (KD=0.7 nM), CD32a (KD=846 nM), CD32b (KD=1850 nM), CD16a (KD=1098 nM) and CD16b (KD=2426 nM). Conventional human anti-IgG1 antibodies have comparable binding to these Fc receptors (KD shown in the table below).

| | | Full length human |
|---|---|---|
| | CD19-F5-NKp46-3 | IgG1 antibody |
| Human Fcγ receptor | KD (nM) | KD (nM) |
| CD64 | 0.7 | 0.24 |
| CD32a | 846 | 379 |
| CD32b | 1850 | 1180 |
| CD16a | 1098 | 630 |
| CD16b | 2426 | 2410 |

### NK Cell Engager Proteins are Potent Across Different Tumor Antigens

[0794] NKp46-binding NKCE proteins with Fc domain dimers that bind human CD16 having an arrangement according to the F5 format were constructed in which the tumor antigen-binding VH/VL pairs were varied.

[0795] EGFR:

[0796] Epidermal growth factor receptor (EGFR) is a transmembrane protein that is activated by binding of its specific ligands, including EGFR and TGFα. Mutations that lead to EGFR overexpression or overactivity have been associated with a number of cancers, including squamous-cell carcinoma of the lung, anal cancer, glioblastoma, and head and neck cancer. An NKp46×EGFR NKCE protein having the F5 format was prepared, incorporating an EGFR ABD comprising the VH and VL domains from the FDA-approved antibody cetuximab (Erbitux™), an NKp46-1 VH/VL pair, and an Fc domain that binds human CD16. The protein was compared to the full-length anti-EGFR IgG1 antibody having the same VH and VL domains.

[0797] FIG. 24 shows that the NKp46×EGFR NKCE protein, whose Fc domain binds CD16A, is highly potent in mediating A549 target cell lysis, as potent as the full-length IgG1 anti-EGFR antibody, despite the ability of the full-length IgG1 to bind EGFR bivalently.

[0798] ROR1:

[0799] ROR1 (receptor tyrosine kinase-like orphan receptor 1) is a glycosylated type I membrane protein that belongs to the ROR subfamily of cell surface receptors. It is a pseudokinase that lacks catalytic activity and may interact with the non-canonical Wnt signalling pathway. ROR1 is expressed at very low levels in adult tissues but was found to be expressed at higher levels initially in B-cell chronic lymphocytic leukemia. ROR1 was subsequently found to be expressed moderately or strongly in human cancers derived from a diverse array of tissues, including, e.g., breast, lung, ovarian and pancreatic cancers. An NKp46×ROR1 NKCE protein having the F5 format was prepared, incorporating an NKp46-1 ABD and an Fc domain that binds human CD16. The protein was compared to a full-length IgG1 anti-ROR1 antibody having the same VH and VL domains.

[0800] FIG. 25 shows that the NKp46×ROR1 NKCE protein, whose Fc domain binds CD16A, is highly potent in mediating Mino tumor target cell lysis, and moreover, with greater than ten-fold the potency of the full-length IgG1 anti-ROR1 antibody, despite the ability of the full-length IgG1 to bind ROR1 bivalently.

[0801] KIR3DL2

[0802] KIR3DL2 (CD158k) is a cell surface receptor expressed on a subset of healthy circulating NK and CD8+ T lymphocytes. KIR3DL2 has also been found on the surface of malignant tumor cells in cutaneous T cell lymphomas and in a variety of types of peripheral T cell lymphomas. An NKp46×KIR3DL2 NKCE having the structure of Format 5 was prepared, incorporating an NKp46-1 ABD and an Fc domain that binds human CD16. The protein was compared to a full-length IgG1 anti-KIR3DL2 antibody having the same VH and VL domains.

[0803] FIG. 26 shows that the NKp46×KIR3DL2 NKCE protein, whose Fc domain binds CD16A, is highly potent in mediating HUT78 tumor target cell lysis, and moreover, it is significantly more potent than the full-length IgG1 anti-KIR3DL2 antibody despite the ability of the full-length IgG1 to bind KIR3DL2 bivalently.

### Example 19: NKCE-IL15 Promotes Activation of NK Cells

[0804] Heterotrimeric NKp46-binding NKCE proteins in the “T5” format of FIG. 2 were prepared as for the IL-2v-containing NKCE molecules, but comprising a wild-type IL-15 moiety in place of the IL-2v moiety, and assessed for its ability to promote IL-2R activation of NK cells. The NKCE were made to bind CD20 by incorporating anti-CD20 VH/VL pair from the FDA-approved humanized antibody GA101.

[0805] The heterotrimeric Fc-domain-containing protein CD20-T5A-NKp46-IL15 was assessed for its ability to activate cytokine receptor signalling in NK cells. The CD20-T5A-NKp46-IL15 protein has the domain structure shown in FIG. 2G (structure T5A), and the amino acid sequence shown in Table 6 and polypeptide chains of SEQ ID NOS: 447-479, and has an antigen binding domain that binds CD20 positioned N-terminally, and incorporates a C-terminal positioned IL15, a wild-type Fc domain (i.e. that binds human CD16A), and an antigen binding domain that binds NKp46 derived from the VH/VL pair NKp46-4 placed between the Fc domain and the IL15 moiety. Also tested was the CD20-T6AB3-IC-IL15 protein which has the same amino acid sequence as the CD20-T5A-NKp46-IL15 except that the NKp46 binding VH/VL pair is replaced by a VH/VL pair that does not bind to any antigen in the experimental system, and the Fc domain comprises the mutation N297S (Kabat EU numbering) to abolish binding to CD16A.

[0806] Briefly, 1M/well of purified PBMC were seeded in 96-well plates and treated with increasing doses of NKCE-IL15 for 20 min at 37° C. STAT5 phosphorylation was then analysed by flow cytometry on NK cells (CD3-CD56+).

[0807] Results are shown in FIG. 27 showing % of pSTAT5 cells among NK cells on the y-axis and concentration of test protein on the x-axis. CD20-T5A-NKp46-IL15 induced a decrease of at least one order of magnitude in the EC₅₀ for STAT5 phosphorylation among the NK cells, compared to CD20-T6AB3-IC-IL15 that did not bind NKp46 or CD16A.

### Example 20: NKCE-IL15 Promotes NK Cell Proliferation

[0808] In this experiment, wild-type IL15-containing NK cell engager proteins CD20-T5A-NKp46-IL15 and CD20-T6AB3-ICb-IL15 were assessed for their ability to induce proliferation of NK cells, CD4 T cells or CD8 T cells, upon 6 days of incubation.

[0809] Briefly, CellTraceViolet labelled-purified PBMC were cultured with a dose range of NKCE-IL15 for 6 days. Cell proliferation was evaluated by quantification of the percentage of cells showing a diluted CellTraceViolet (CTV) signal monitored by flow cytometry, on NK cells (CD3− CD56+), CD4 T cells (CD3+ CD4+) and CD8 T cells (CD3+ CD8+).

[0810] Results are shown in FIG. 28 showing % of proliferating NK, CD4 T or CD8 T cells on the y-axis and concentration of test protein on the x-axis. The CD20-T5A-NKp46-IL15 resulted in strong NK cell proliferation, with an increase in potency of at least 1-log for NK cell proliferation compared to the CD20-T6AB3-IC-IL15 protein that did not bind NKp46 or CD16A. The increase in potency was selective for NK cells, as there was no increase potency by CD20-T5A-NKp46-IL15 for induction of CD4 and CD8 T cell proliferation.

### Example 21: NKCE-IL15 Promotes Tumor Cell Killing in a Standard Vitro Cytotoxicity Assay

[0811] In this experiment, wild-type IL15-containing NK cell engager proteins CD20-T5A-NKp46-IL15 and IC-T5A-NKp46-IL15 were assessed for their ability to induce killing of RAJI tumor cells by purified human NK cells. IC-T5A-NKp46-IL15 protein is identical to CD20-T5A-NKp46-IL15 except that the CD20-binding VH/VL pair is replaced by a VH/VL pair (IC) that does not bind to any antigen present in the experimental system. Briefly, purified NK Cells were cocultured with Raji tumor cells previously loaded with calcein, in a 10 to 1 ratio. Cells were incubated with test proteins described above NKCE-IL15 for 4 h at 37° C., 5.5% CO₂ in incubator.

[0812] Results are shown in FIG. 29, showing % specific lysis induced by NK cells on the y-axis and concentration of test protein on the x-axis. The IC-T5A-NKp46-IL15 that lacked binding to CD20 on targeted cells did not induce significant cytotoxicity. CD20-T5A-NKp46-IL15 on the other hand displayed high potency in terms of EC50 values in induction of NK cell cytotoxicity toward the tumor cells.

### Example 22: NKCE-IL18v Redirects IL18v Activity to Promote Activation of NK Cells

[0813] Heterotrimeric NKp46-binding NKCE proteins in the “T5A” format of FIG. 2G were prepared as for the IL-2v-containing NKCE molecules, but having a variant of IL-18 (IL-18v) moiety in place of the IL-2v moiety, and assessed for its ability to promote IL-18R activation of NK cells. A control protein was prepared having the “T6AB3” structure of FIG. 21. The NKCE proteins were made to bind CD20 by incorporating anti-CD20 VH/VL pair from the FDA-approved humanized antibody GA101.

[0814] The heterotrimeric Fc-domain-containing protein CD20-T5A-NKp46-IL18v was assessed for its ability to activate NK cells. The CD20-T5A-NKp46-IL18v protein has the domain structure shown in FIG. 2G, and the amino acid sequence shown in Table 6 and the polypeptide chains of SEQ ID NOS: 486-488, with an antigen binding domain that binds CD20 positioned N-terminally, and incorporates a C-terminal positioned IL18v, a wild-type Fc domain (i.e. that binds human CD16A), and an antigen binding domain that binds NKp46 derived from the VH/VL pair NKp46-4 placed between the Fc domain and the IL18v moiety. The CD20-T6AB3-IC-IL18v protein that did not bind NKp46 or CD16A was used as control molecule that did not bind NK cells.

[0815] Briefly, 0.1M/well of purified NK cells were seeded in 96-well plate and treated overnight with increasing doses of each NKCE-IL18v protein, in presence of 10 ng/mL IL-12. Cells were analyzed by flow cytometry for % of CD69 expressing cells and medFI of CD69 expression.

[0816] Results are shown in FIG. 30, the left hand panel showing % of CD69 expressing NK cells on the y-axis and concentration of test protein on the x-axis, and right hand panel showing median fluorescence intensity (medFI) of CD69 expression in NK cells. CD20-T5A-NKp46-IL18v induced a decrease in the range of two orders of magnitude in the EC₅₀ for activation of NK cells, compared to CD20-T6AB3-IC-IL18v that did not bind CD16A or NKp46 on NK cells.

### Example 23: NKCE-IL18v Redirects IL18v Activity to Promote IFNγ Production by NK Cells

[0817] In this experiment, IL18v-containing NK cell engager proteins CD20-T5A-NKp46-IL18v and CD20-T6AB3-IC-IL18v were assessed for their ability to promote interferon-gamma (IFN-γ) production by NK cells. Purified NK cells were treated overnight with CD20-T5A-NKp46-IL18v or CD20-T6AB3-IC-IL18v, in presence of 10 ng/mL of IL-12 in 96-well plates. IFN-γ was analysed by flow cytometry.

[0818] Results are shown in FIG. 31, with % of IFN-γ expressing NK cells on the y-axis and concentration of test protein on the x-axis. CD20-T5A-NKp46-IL18v induced a decrease in the range of two orders of magnitude in the EC₅₀ for activation of NK cells, compared to CD20-T6AB3-IC-IL18v that did not bind CD16A or NKp46 on NK cells.

### Example 24: NKCE-IL18v Promotes NK Cell Proliferation

[0819] In this experiment, IL18v-containing NK cell engager proteins CD20-T5A-NKp46-IL18v and CD20-T6AB3-IC-IL18v were assessed for their ability to induce proliferation of NK cells, CD4 T cells or CD8 T cells, upon 6 days of incubation. The CD20-T6AB3-IC-IL18v protein has the same amino acid sequence as the CD20-T5A-NKp46-IL18v except that the NKp46 binding VH/VL pair is replaced by a VH/VL pair that does not bind to any antigen in the experimental system, and the Fc domain comprises the mutations N297S to abolish binding to CD16A.

[0820] Briefly, CellTraceViolet labelled-purified PBMC were cultured with a dose range of NKCE-IL18v for 6 days days. Cell proliferation was evaluated by quantification of the percentage of cells showing a diluted CellTraceViolet (CTV) signal monitored by flow cytometry, on NK cells (CD3-CD56+), CD4 T cells (CD3⁺CD4+) and CD8 T cells (CD3+CD8+).

[0821] Results are shown in FIG. 32 showing % of proliferating NK, CD4 T or CD8 T cells on the y-axis and concentration of test protein on the x-axis. The CD20-T5A-NKp46-IL18v resulted in strong NK cell proliferation. The CD20-T6AB3-IC-IL18v protein that did not bind CD16A or NKp46 did not show significant activation of NK cells. The strong NK cell proliferation by CD20A-T5-NKp46-IL18v was selective for NK cells, as there was no significant proliferation induced in CD4 or CD8 T cells. CD20-T6AB3-IC-IL18v also showed no significant induction of CD4 or CD8 T cell proliferation.

### Example 25: NKCE-IL18v Promotes Tumor Cell Killing in a Standard Vitro Cytotoxicity Assay

[0822] In this experiment, the IL18v-containing NK cell engager proteins CD20-T5A-NKp46-IL18v and IC-T5A-NKp46-IL18v were assessed for their ability to induce killing of RAJI tumor cells by NK cells from human donors. IC-T5A-NKp46-IL18v protein is identical to CD20-T5A-NKp46-IL18v except that the CD20-binding VH/VL pair is replaced by a VH/VL pair (IC) that does not bind to any antigen present in the experimental system.

[0823] Briefly, human purified NK Cells were cocultured with Raji tumor cells previously loaded with calcein, in a 10 to 1 ratio. Cells were incubated with test NKCE-IL18v proteins for 4 h at 37° C., 5.5% CO₂ in an incubator.

[0824] Results are shown in FIG. 33, showing % specific lysis induced by NK cells on the y-axis and concentration of test protein on the x-axis. The IC-T5A-NKp46-IL18v that lacked binding to CD20 on targeted cells did not induce significant cytotoxicity. CD20-T5A-NKp46-IL18v on the other hand displayed high potency in terms of EC₅₀ values in induction of NK cell cytotoxicity toward the tumor cells.

### Example 26: NK Cell Targeting Redirects IFNαv Activity to NK Cells to Promote Activation

[0825] Heterotrimeric NKp46-binding NKCE proteins in the “T5A” format of FIG. 2 were prepared as for the IL-2v-containing NKCE molecules, but comprising a variant IFNα (IFNαv) moiety in place of the IL-2v moiety, and assessed for its ability to promote IFNAR-mediated activation of NK cells. The NKCE were made to bind CD20 by incorporating anti-CD20 VH/VL pair from the FDA-approved humanized antibody GA101.

[0826] The heterotrimeric Fc-domain-containing protein CD20-T5A-NKp46-IFNαv was assessed for its ability to activate NK cells. The CD20-T5A-NKp46-IFNαv protein has the domain structure shown in FIG. 2G, and the amino acid sequence shown in Table 6 and the polypeptide chains of SEQ ID NOS: 495-497, and has an antigen binding domain that binds CD20 positioned N-terminally, and incorporates a C-terminal positioned IFNαv, a wild-type Fc domain (i.e. that binds human CD16A), and an antigen binding domain that binds NKp46 derived from the VH/VL pair NKp46-4 placed between the Fc domain and the IFNαv moiety. Also tested as control was the CD20-T6AB3-IC-IFNαv protein which has the same amino acid sequence as the CD20-T5A-NKp46-IFNαv except that the NKp46 binding VH/VL pair is replaced by a VH/VL pair that does not bind to any antigen in the experimental system, and the Fc domain comprises the mutation N297S to abolish binding to CD16A.

[0827] Briefly, 1M/well of purified PBMC were seeded in 96-well plates and treated with increasing doses of NKCE-IFNαv for 20 minutes at 37° C. STAT3 phosphorylation was then analysed by flow cytometry on NK cells (CD3− CD56+), CD4 T cells (CD3+ CD4+) and CD8 T cells (CD3+ CD8+).

[0828] Results are shown in FIG. 34 showing % of pSTAT3 cells among NK cells, CD4 T or CD8 T cells on the y-axis and concentration of test protein on the x-axis. CD20-T5A-NKp46-IFNαv induced potent STAT3 phosphorylation among the NK cells, compared to CD20-T6AB3-IC-IFNαv that did not induce any significant NK cell activation. The potent NK cell activating activity of CD20-T5A-NKp46-IFNαv was selective for NK cells, as there was no significant activation by of CD4 or CD8 T cells.

### Example 27: NKCE-IFNαv Promotes Tumor Cell Killing in a Standard Vitro Cytotoxicity Assay

[0829] In this experiment, the IFNαv-containing NK cell engager proteins CD20-T5A-NKp46-IFNαv and IC-T5A-NKp46-IFNαv were assessed for their ability to induce killing of RAJI tumor cells by NK cells. IC-T5A-NKp46-IFNαv protein is identical to CD20-T5A-NKp46-IFNαv except that the CD20-binding VH/VL pair is replaced by a VH/VL pair (IC) that does not bind to any antigen present in the experimental system.

[0830] Briefly, human purified NK Cells were cocultured with Raji tumor cells previously loaded with calcein, in a 10 to 1 ratio. Cells were incubated with test NKCE-IFNαv proteins for 4 h at 37° C., 5.5% CO₂ in an incubator.

[0831] Results are shown in FIG. 35, showing % specific lysis induced by NK cells on the y-axis and concentration of test protein on the x-axis. The IC-T5A-NKp46-IFNαv that lacked binding to CD20 on targeted cells did not induce significant cytotoxicity. CD20-T5A-NKp46-IFNαv on the other hand displayed high potency in terms of EC₅₀ values in induction of NK cell cytotoxicity toward the tumor cells.

### Example 28: NKCE-IL2v Induces Minimal Systemic Cytokine Release In Vivo in Non-Human Primates

[0832] Following the favorable safety profile observed in mice following CD20-T5-NKp46-IL2v treatment (see Example 18), we assessed the effect of treatment with the NK cell engager GA101-T5-NKp46-IL2v (SEQ ID NOS: 175-177) in non-human primates. M. fascicularis were injected with a single intravenous injection of either 0.05 mg/kg body weight (the low dose) or 0.5 mg/kg body weight (the high dose) of CD20-T5-NKp46-IL2v (with CD16A binding), or 0.5 mg/kg of GA101-T6-NKp46-IL2v (SEQ ID NOS: 184-186; N297S mutation conferring lack of binding to CD16A), with four animals per dose level.

[0833] FIG. 36 shows the difference from baseline of the B cell count (cells/μL) over the 14 days before and 30 days following treatment with the NKCE proteins (treatment is Day 0), showing that the NKCE proteins induced B cell depletion, while control (vehicle) did not.

[0834] FIG. 37 shows production of different cytokines over the course of 24 hours following administration of the NKCE proteins. For each time point post treatment, the plasma concentration of cytokine is shown in ng/mL sera. These data show that the CD20-T5-NKp46-IL2v induced only minimal systemic cytokine production during the 24 hours following treatment, suggesting that the CD20-T5-NKp46-IL2v does not involve immune toxicity, despite its potent cell depleting activity. The safety profile is particularly remarkable considering the cytokine concentration values observed in comparable experiments with T cell engager protein, for example Engelberts et al., (Ebiomedicine 2020 vol. 52, 102625) report the following values upon administration of 1 mg/kg DuoBody®-CD3×CD20, a full-length human IgG1 bispecific antibody (bsAb) recognizing CD3 and CD20, generated by controlled Fab-arm exchange, with an Fc domain silenced by introduction of mutations: IFN-γ (greater than 1 ng/mL), IL-6 (greater than 8 ng/mL), TNFα (greater than 1.7 ng/mL), IL-10 (greater than 10 ng/mL), IL-8 (greater than 5 ng/mL), MCP (greater than 500 ng/mL).

[0835] No reactions were observed at the injection site. Behavioral scoring was carried out on a scale from 1 to 30, where 20-30 indicates increasing severe distress, 12-20 indicates increasing signs of suffering, 12 indicates strong alteration of behavior, 7 indicates moderate behavior alteration and 1 indicates healthy individuals. NKCEs did not cause any suffering and yet further were well below the level associated with even moderate behavioral alteration. Upon clinical examination, all parameters observed remained within the normal range of values. Upon blood analysis, all parameters observed for animals treated with the NKCEs remained generally similar to vehicle and within the normal range of values, including blood levels of sodium, potassium, chlorine, bicarbonates, phosphorus, ferritin and fructosamine, albumin, globulin, creatinine, urea, total protein, cholesterol, triglycerides, ALAT, ASAT an alkaline phosphatase. FIG. 38 shows mean values for red blood cells, platelets, hemoglobin, hematocrit, mean corpuscular volume, mean corpuscular hemoglobin and mean corpuscular hemoglobin concentration for animals treated with the NKCEs or vehicle over a period from 14 days before treatment through 30 days following treatment. FIG. 39 shows mean levels of white blood cells, lymphocytes, monocytes, neutrophils, eosinophils and basophils cells over a period from 14 days before treatment through 30 days following treatment. FIG. 40 shows mean levels of NK cells, CD8⁺ T cells, FoxP3⁻CD4⁺ T cells and FoxP3⁺CD4⁺ T cells over a period from 14 days before treatment through 30 days following treatment. All of the NKCE proteins induced an expansion of NK cells at day 3 and day 7. An increase of CD8+ T cells was observed with both CD20-T5-NKp46-IL2v and CD20-T6-NKp46-IL2v at the high dose of proteins but not lower dose of CD20-T5-NKp46-IL2v. An increase of FoxP3⁺CD4⁺ T cells was observed with CD20-T6-NKp46-IL2v but not with either low or high dose of CD20-T5-NKp46-IL2v.

### Example 29: NKCE-IL2v Therapy Increases NK Cells in the Tumor Bed in Immunocompetent Mice

[0836] NKCE-IL2v proteins were assessed for their effect on intratumoral accumulation of NK cells in an immunocompetent mouse solid tumor model.

[0837] Briefly huCD20 (human CD20) expressing B16F10 melanoma cells were engrafted in C57BL6 mice. At day 1 and day 8, mice were treated with 25 μg of CD20-T5-NKp46-IL2v. Tumors were analysed at day 13 for NK cell infiltration by flow cytometry. NK cells were identified as NK1.1+CD3−.

[0838] Results are shown in FIG. 41. NK cells (NK1.1+CD3−) represented 20.4% of CD45+ cells in the tumor in the absence of treatment with CD20-T5-NKp46-IL2v. However, when mice were treated with CD20-T5-NKp46-IL2v, the NK cells (NK1.1+CD3−) represented 50.4% of total CD45+ cells in the tumor demonstrating the strong capacity of NKCE-IL2v to stimulate NK cell accumulation at the tumor site.

### Example 30: NKCE-IL2v Treatment Induces NK Cell Expansion and Activation in Spleen of Immunocompromised Mice

[0839] NKCE-IL2v proteins were assessed for their effect on NK number and activation cells outside the tumor compartment in an immunocompromised mice model in which NK cells remain functional.

[0840] Briefly, CB17 SCID (immunocompromised) bearing RAJI sc tumor were treated with a single i.v injection of 70 μg CD20-T5-NKp46-IL2v, 125 μg CD20-F5-NKp46 (shares the same structure as CD20-T5-NKp46-IL2v but lacks IL2v moiety) or 600 μg obinutuzumab. 3 days after treatment, spleens were analysed by flow cytometry for NK cell number, CD69 and Ki67 expression.

[0841] Results are shown in FIG. 42. While treatment with CD20-F5-NKp46 and obinutuzumab did not increase the number of NK cells, treatment with CD20-T5-NKp46-IL2v caused a strong increase in NK cells in the spleen. Additionally, while treatment with CD20-F5-NKp46 or obinutuzumab did not increase the proportion of activated or proliferating NK cells among total NK cells, treatment with CD20-T5-NKp46-IL2v caused a strong increase in activated or proliferating NK cells among total NK cells. These data indicate that NKCE-IL2v can expand the population of NK cells outside of the tumor microenvironment, generating a pool of NK cells that could potentially contribute to antitumor activity in immunocompromised mice.

### Example 31: NKCE-IL2v Treatment Induces NK Cell Expansion and Activation in Blood and Spleen of Immunocompetent Tumor-Bearing Mice

[0842] NKCE-IL2v proteins were assessed for their effect on NK cells number and activation in blood and spleen in immunocompenent mice bearing a solid tumor.

[0843] Briefly, C57BL6 mice (immunocompetent) bearing huCD20B16F10 (human CD20-expressing mouse B16F10 cells) subcutaneous tumors were treated with 25 μg of CD20-T5-NKp46-IL2v in a single i.v injection. NK cell number and CD69 expression in spleen and blood were analyzed by flow cytometry at day +4 after treatment.

[0844] Results are shown in FIG. 43. Treatment with CD20-T5-NKp46-IL2v caused a strong increase in NK cell number per μl of blood and also in the spleen. Additionally, treatment with CD20-T5-NKp46-IL2v caused a strong increase in activated (CD69-expressing) NK cells among NK cells in blood and spleen. The majority of cells in both spleen and blood were activated (in the range of 80% of NK cells were CD69-positive, compared to 20% in the control (vehicle) treated mice). These data indicate that NKCE-IL2v can expand the population of NK cells in blood and spleen, generating a pool of NK cells that could potentially contribute to antitumor activity in immunocompetent mice.

### Example 32: Epitope Mapping of Anti-NKp46 Antibodies

[0845] A. Competition Assays

[0846] Competition assays were conducted by Surface Plasmon Resonance (SPR according to the methods described below.

[0847] SPR measurements were performed on a Biacore T100 apparatus (Biacore GE Healthcare) at 25° C. In all Biacore experiments HBS-EP+(Biacore GE Healthcare) and NaOH 10 mM NaCl 500 mM served as running buffer and regeneration buffer respectively. Sensorgrams were analyzed with Biacore T100 Evaluation software. Anti-6×His tag antibody was purchased from QIAGEN. Human 6×His tagged NKp46 recombinant proteins (NKp46-His) were cloned, produced and purified at Innate Pharma.

[0848] Anti-His antibodies were immobilized covalently to carboxyl groups in the dextran layer on a Sensor Chip CM5. The chip surface was activated with EDC/NHS (N-ethyl-N′-(3-dimethylaminopropyl) carbodiimidehydrochloride and N-hydroxysuccinimide (Biacore GE Healthcare)). Protein-A and anti-His antibodies were diluted to 10 μg/ml in coupling buffer (10 mM acetate, pH 5.6) and injected until the appropriate immobilization level was reached (i.e. 2000 to 2500 RU). Deactivation of the remaining activated groups was performed using 100 mM ethanolamine pH 8 (Biacore GE Healthcare).

[0849] Parental regular human IgG1 chimeric antibodies having NKp46 binding region corresponding to NKp46-1, NKp46-2, NKp46-3 or NKp46-4 were used for the competition study which has been performed using an Anti-6×His tag antibody chip. Bispecific antibodies having NKp46 binding region based on NKp46-1, NKp46-2, NKp46-3 or NKp46-4 at 1 μg/mL were captured onto Protein-A chip and recombinant human NKp46 proteins were injected at 5 μg/mL together with a second test bispecific antibody of the NKp46-1, NKp46-2, NKp46-3 or NKp46-4 group.

[0850] The results demonstrated that none of NKp46-1, NKp46-2, NKp46-3 or NKp46-4 competed with one another for binding to NKp46. Accordingly these antibodies each bind or interact with a different NKp46 epitope.

[0851] B. Binding to NKp46 Mutants

[0852] In order to define the epitopes of these anti-NKp46 antibodies, we designed NKp46 mutants defined by one, two or three substitutions of amino acids exposed at the molecular surface over the 2 domains of NKp46. This approach led to the generation of 42 mutants which were transfected in Hek-293T cells, as shown in the table below. The targeted amino acid mutations in Table 9 below are shown both according to the numbering of SEQ ID NO: 1 (also corresponding to the numbering used in Jaron-Mendelson et al. (2012) J. Immunol. 88(12):6165-74.

TABLE 9

| | |
|---|---|
| | Substitution (Numbering according to: |
| Mutant | Jaron-Mendelson and SEQ ID NO 1) |

| | | | |
|---|---|---|---|
| 1 | P40A | K43S | Q44A |
| 2 | K41S | E42A | E119A |
| 3 | P86A | D87A | |
| 4 | N89A | R91A | |
| 5 | K80A | K82A | |
| 5bis | E34A | T46A | |
| 6 | R101A | V102A | |
| 7 | N52A | Y53A | |
| 8 | V56A | P75A | E76A |
| 9 | R77A | I78A | |
| 10 | S97A | I99A | |
| 10bis | Q59A | H61A | |
| 11 | L66A | V69A | |
| 12 | E108A | | |
| 13 | N111A | L112A | |
| 14 | D114A | | |
| 15 | T125A | R145S | D147A |
| 16 | S127A | Y143A | |
| 17 | H129A | K139A | |
| 18 | K170A | V172A | |
| 19 | I135A | S136A | |
| 19bis | T182A | R185A | |
| 20 | R160A | | |
| 21 | K207A | | |
| 22 | M152A | R166A | |
| 23 | N195A | N196A | |
| Stalk1 | D213A | I214A | T217A |
| Stalk2 | F226A | T233A | |
| Stalk3 | L236A | T240A | |
| Supp1 | F30A | W32A | |
| Supp2 | F62A | F67A | |
| Supp3 | E63A | Q95A | |
| Supp4 | R71A | K73A | |
| Supp5 | Y84A | | |
| Supp6 | E104A | L105A | |
| Supp7 | Y121A | Y194A | |
| Supp8 | P132A | E133A | |
| Supp9 | S151A | Y168A | |
| Supp10 | S162A | H163A | |
| Supp11 | E174A | P176A | |
| Supp12 | P179A | H184A | |
| Supp13 | R189A | E204A | P205A |

[0853] C. Generation of Mutants

[0854] NKp46 mutants were generated by PCR. The sequences amplified were run on agarose gel and purified using the Macherey Nagel PCR Clean-Up Gel Extraction kit. Two or three purified PCR products generated for each mutant were then ligated into an expression vector, with the ClonTech InFusion system. The vectors containing the mutated sequences were prepared as Miniprep and sequenced. After sequencing, the vectors containing the mutated sequences were prepared as Midiprep using the Promega PureYield™ Plasmid Midiprep System. HEK293T cells were grown in DMEM medium (Invitrogen), transfected with vectors using Invitrogen's Lipofectamine 2000 and incubated at 37° C. in a CO₂ incubator for 24 hours prior to testing for transgene expression.

[0855] D. Flow Cytometry Analysis of Anti-NKp46 Binding to the HEK293T Transfected Cells

[0856] All the anti-NKp46 antibodies were tested for their binding to each mutant by flow cytometry. A first experiment was performed to identify antibodies that lose their binding to one or several mutants at a particular concentration (10 μg/ml). To confirm the loss of binding, titration of antibodies was done using antibodies for which binding seemed to be affected by the NKp46 mutations (1-0.1-0.01-0.001 μg/ml).

[0857] E. Results

[0858] Antibody NKp46-1 had decreased binding to the mutant 2 (having a mutation at residues K41, E42 and E119) (numbering in NKp46 wild-type) compared to wild-type NK46. Similarly, NKp46-1 also had decreased binding to the supplementary mutant Supp7 (having a mutation at residues Y121 and Y194).

[0859] Antibody NKp46-3 had decreased binding to the mutant 19 (having a mutation at residues 1135, and S136). Similarly, NKp46-3 also had decreased binding to the supplementary mutant Supp8 (having a mutation at residues P132 and E133). Antibody NKp46-4 had decreased binding to the mutant 6 (having a mutation at residues R101, and V102). Similarly, NKp46-4 also had decreased binding to the supplementary mutant Supp6 having a mutation at residues E104 and L105.

[0860] Using these methods we identified the epitopes for anti-NKp46 antibodies NKp46-1, NKp46-3 and NKp46-4. We determined that the epitopes of NKp46-4, NKp46-3 and NKp46-1 are on NKp46 D1 domain, D2 domain and D1/D2 junction, respectively. R101, V102, E104 and L105 are essential residues for NKp46-4 binding and defined a part of NKp46-4 epitope. The epitope of NKp46-1 epitope includes K41, E42, E119, Y121 and Y194 residues. The epitope of NKp46-3 includes P132, E133, 1135, and S136 residues.

[0861] All headings and sub-headings are used herein for convenience only and should not be construed as limiting the invention in any way. Any combination of the above-described elements in all possible variations thereof is encompassed by the invention unless otherwise indicated herein or otherwise clearly contradicted by context. Recitation of ranges of values herein are merely intended to serve as a shorthand method of referring individually to each separate value falling within the range, unless otherwise indicated herein, and each separate value is incorporated into the specification as if it were individually recited herein. Unless otherwise stated, all exact values provided herein are representative of corresponding approximate values (e. g., all exact exemplary values provided with respect to a particular factor or measurement can be considered to also provide a corresponding approximate measurement, modified by “about,” where appropriate). All methods described herein can be performed in any suitable order unless otherwise indicated herein or otherwise clearly contradicted by context.

[0862] The use of any and all examples, or exemplary language (e.g., “such as”) provided herein is intended merely to better illuminate the invention and does not pose a limitation on the scope of the invention unless otherwise indicated. No language in the specification should be construed as indicating any element is essential to the practice of the invention unless as much is explicitly stated.

[0863] The description herein of any aspect or embodiment of the invention using terms such as reference to an element or elements is intended to provide support for a similar aspect or embodiment of the invention that “consists of’,” “consists essentially of” or “substantially comprises” that particular element or elements, unless otherwise stated or clearly contradicted by context (e.g., a composition described herein as comprising a particular element should be understood as also describing a composition consisting of that element, unless otherwise stated or clearly contradicted by context).

[0864] This invention includes all modifications and equivalents of the subject matter recited in the aspects or claims presented herein to the maximum extent permitted by applicable law.

[0865] All publications and patent applications cited in this specification are herein incorporated by reference in their entireties as if each individual publication or patent application were specifically and individually indicated to be incorporated by reference.

[0866] Although the foregoing invention has been described in some detail by way of illustration and example for purposes of clarity of understanding, it will be readily apparent to one of ordinary skill in the art in light of the teachings of this invention that certain changes and modifications may be made thereto without departing from the spirit or scope of the appended claims.

The application's sequence listing, which the Patent Office published only in electronic form, follows.

SEQUENCE LISTING (509 sequences)

SEQ ID NO: 1 - protein, 304 aa, homo sapiens
MSSTLPALLCVGLCLSQRISAQQQTLPKPFIWAEPHFMVPKEKQVTICCQGNYGAVEYQLHFEGSLFAVDRPKPPERINKVKFYIPDMNSRMAGQYSCIYRVGELWSEPSNLLDLVVTEMYDTPTLSVHPGPEVISGEKVTFYCRLDTATSMFLLLKEGRSSHVQRGYGKVQAEFPLGPVTTAHRGTYRCFGSYNNHAWSFPSEPVKLLVTGDIENTSLAPEDPTFPADTWGTYLLTTETGLQKDHALWDHTAQNLLRMGLAFLVLVALVWFLVEDWLSRKRTRERASRASTWEGRRRLNTQTL

SEQ ID NO: 2 - protein, 216 aa, homo sapiens
APELLGGPSVFLFPPKPKDTLMISRTPEVTCVVVDVSHEDPEVKFNWYVDGVEVHNAKTKPREEQYNSTYRVVSVLTVLHQDWLNGKEYKCKVSNKALPAPIEKTISKAKGQPREPQVYTLPPSREEMTKNQVSLTCLVKGFYPSDIAVEWESNGQPENNYKTTPPVLDSDGSFFLTSKLTVDKSRWQQGNVFSCSVMHEALHNHYTQKSLSLSPG

SEQ ID NO: 3 - protein, 120 aa, Mus musculus
QVQLQQSGPELVKPGASVKMSCKASGYTFTDYVINWGKQRSGQGLEWIGEIYPGSGTNYYNEKFKAKATLTADKSSNIAYMQLSSLTSEDSAVYFCARRGRYGLYAMDYWGQGTSVTVSS

SEQ ID NO: 4 - protein, 107 aa, Mus musculus
DIQMTQTTSSLSASLGDRVTISCRASQDISNYLNWYQQKPDGTVKLLIYYTSRLHSGVPSRFSGSGSGTDYSLTINNLEQEDIATYFCQQGNTRPWTFGGGTKLEIK

SEQ ID NO: 5 - protein, 122 aa, Mus musculus
EVQLQESGPGLVKPSQSLSLTCTVTGYSITSDYAWNWIRQFPGNKLEWMGYITYSGSTSYNPSLESRISITRDTSTNQFFLQLNSVTTEDTATYYCARGGYYGSSWGVFAYWGQGTLVTVSA

SEQ ID NO: 6 - protein, 107 aa, Mus musculus
DIQMTQSPASLSASVGETVTITCRVSENIYSYLAWYQQKQGKSPQLLVYNAKTLAEGVPSRFSGSGSGTQFSLKINSLQPEDFGSYYCQHHYGTPWTFGGGTKLEIK

SEQ ID NO: 7 - protein, 116 aa, Mus musculus
EVQLQQSGPELVKPGASVKISCKTSGYTFTEYTMHWVKQSHGKSLEWIGGISPNIGGTSYNQKFKGKATLTVDKSSSTAYMELRSLTSEDSAVYYCARRGGSFDYWGQGTTLTVSS

SEQ ID NO: 8 - protein, 107 aa, Mus musculus
DIVMTQSPATLSVTPGDRVSLSCRASQSISDYLHWYQQKSHESPRLLIKYASQSISGIPSRFSGSGSGSDFTLSINSVEPEDVGVYYCQNGHSFPLTFGAGTKLELK

SEQ ID NO: 9 - protein, 117 aa, Mus musculus
QVQLQQSAVELARPGASVKMSCKASGYTFTSFTMHWVKQRPGQGLEWIGYINPSSGYTEYNQKFKDKTTLTADKSSSTAYMQLDSLTSDDSAVYYCVRGSSRGFDYWGQGTLVTVSA

SEQ ID NO: 10 - protein, 107 aa, Mus musculus
DIQMIQSPASLSVSVGETVTITCRASENIYSNLAWFQQKQGKSPQLLVYAATNLADGVPSRFSGSGSGTQYSLKINSLQSEDFGIYYCQHFWGTPRTFGGGTKLEIK

SEQ ID NO: 11 - protein, 115 aa, Mus musculus
QVQLQQPGSVLVRPGASVKLSCKASGYTFTSSWMHWAKQRPGQGLEWIGHIHPNSGISNYNEKFKGKATLTVDTSSSTAYVDLSSLTSEDSAVYYCARGGRFDDWGAGTTVTVSS

SEQ ID NO: 12 - protein, 107 aa, Mus musculus
DIQMTQSPSSLSASLGERVSLTCRASQDIGSSLNWLQQEPDGTIKRLIYATSSLDSGVPKRFSGSRSGSDYSLTISSLESEDFVDYYCLQYASSPWTFGGGTKLEIK

SEQ ID NO: 13 - protein, 120 aa, Mus musculus
DVQLQESGPGLVKPSQSLSLTCTVTGYSITSDYAWNWIRQFPGNKLEWMGYITYSGSTNYNPSLKSRISITRDTSKNQFFLQLNSVTTEDTATYYCARCWDYALYAMDCWGQGTSVTVSS

SEQ ID NO: 14 - protein, 107 aa, Mus musculus
DIQMTQSPASLSASVGETVTITCRTSENIYSYLAWCQQKQGKSPQLLVYNAKTLAEGVPSRFSGSGSGTHFSLKINSLQPEDFGIYYCQHHYDTPLTFGAGTKLELK

SEQ ID NO: 15 - protein, 5 aa, mus musculus
DYVIN

SEQ ID NO: 16 - protein, 7 aa, mus musculus
GYTFTDY

SEQ ID NO: 17 - protein, 8 aa, mus musculus
GYTFTDYV

SEQ ID NO: 18 - protein, 17 aa, mus musculus
EIYPGSGTNYYNEKFKA

SEQ ID NO: 19 - protein, 4 aa, mus musculus
PGSG

SEQ ID NO: 20 - protein, 16 aa, mus musculus
GYTFTDYVIYPGSGTN

SEQ ID NO: 21 - protein, 11 aa, mus musculus
RGRYGLYAMDY

SEQ ID NO: 22 - protein, 9 aa, mus musculus
GRYGLYAMD

SEQ ID NO: 23 - protein, 13 aa, mus musculus
ARRGRYGLYAMDY

SEQ ID NO: 24 - protein, 11 aa, mus musculus
RASQDISNYLN

SEQ ID NO: 25 - protein, 7 aa, Mus musculus
SQDISNY

SEQ ID NO: 26 - protein, 6 aa, mus musculus
QDISNY

SEQ ID NO: 27 - protein, 7 aa, Mus musculus
YTSRLHS

SEQ ID NO: 28 - protein, 9 aa, mus musculus
QQGNTRPWT

SEQ ID NO: 29 - protein, 9 aa, Mus musculus
YTSGNTRPW

SEQ ID NO: 30 - protein, 12 aa, Mus musculus
YTSQQGNTRPWT

SEQ ID NO: 31 - protein, 6 aa, Mus musculus
SDYAWN

SEQ ID NO: 32 - protein, 8 aa, Mus musculus
GYSITSDY

SEQ ID NO: 33 - protein, 9 aa, Mus musculus
GYSITSDYA

SEQ ID NO: 34 - protein, 16 aa, Mus musculus
YITYSGSTSYNPSLES

SEQ ID NO: 35 - protein, 7 aa, Mus musculus
ITYSGST

SEQ ID NO: 36 - protein, 13 aa, Mus musculus
GGYYGSSWGVFAY

SEQ ID NO: 37 - protein, 11 aa, Mus musculus
GYYGSSWGVFA

SEQ ID NO: 38 - protein, 15 aa, Mus musculus
ARGGYYGSSWGVFAY

SEQ ID NO: 39 - protein, 11 aa, Mus musculus
RVSENIYSYLA

SEQ ID NO: 40 - protein, 7 aa, Mus musculus
SENIYSY

SEQ ID NO: 41 - protein, 6 aa, Mus musculus
ENIYSY

SEQ ID NO: 42 - protein, 7 aa, Mus musculus
NAKTLAE

SEQ ID NO: 43 - protein, 9 aa, Mus musculus
QHHYGTPWT

SEQ ID NO: 44 - protein, 6 aa, Mus musculus
HYGTPW

SEQ ID NO: 45 - protein, 9 aa, mus musculus
QHHYGTPWT

SEQ ID NO: 46 - protein, 5 aa, Mus musculus
EYTMH

SEQ ID NO: 47 - protein, 7 aa, Mus musculus
GYTFTEY

SEQ ID NO: 48 - protein, 8 aa, Mus musculus
GYTFTEYT

SEQ ID NO: 49 - protein, 17 aa, Mus musculus
GISPNIGGTSYNQKFKG

SEQ ID NO: 50 - protein, 8 aa, Mus musculus
ISPNIGGT

SEQ ID NO: 51 - protein, 7 aa, Mus musculus
RGGSFDY

SEQ ID NO: 52 - protein, 5 aa, Mus musculus
GGSFD

SEQ ID NO: 53 - protein, 9 aa, Mus musculus
ARRGGSFDY

SEQ ID NO: 54 - protein, 11 aa, Mus musculus
RASQSISDYLH

SEQ ID NO: 55 - protein, 7 aa, Mus musculus
SQSISDY

SEQ ID NO: 56 - protein, 6 aa, Mus musculus
QSISDY

SEQ ID NO: 57 - protein, 7 aa, Mus musculus
YASQSIS

SEQ ID NO: 58 - protein, 9 aa, Mus musculus
QNGHSFPLT

SEQ ID NO: 59 - protein, 6 aa, Mus musculus
GHSFPL

SEQ ID NO: 60 - protein, 5 aa, Mus musculus
SFTMH

SEQ ID NO: 61 - protein, 7 aa, Mus musculus
GYTFTSF

SEQ ID NO: 62 - protein, 8 aa, Mus musculus
GYTFTSFT

SEQ ID NO: 63 - protein, 17 aa, Mus musculus
YINPSSGYTEYNQKFKD

SEQ ID NO: 64 - protein, 8 aa, Mus musculus
INPSSGYT

SEQ ID NO: 65 - protein, 8 aa, Mus musculus
GSSRGFDY

SEQ ID NO: 66 - protein, 6 aa, Mus musculus
SSRGFD

SEQ ID NO: 67 - protein, 10 aa, Mus musculus
VRGSSRGFDY

SEQ ID NO: 68 - protein, 11 aa, Mus musculus
RASENIYSNLA

SEQ ID NO: 69 - protein, 6 aa, Mus musculur
ENIYSN

SEQ ID NO: 70 - protein, 7 aa, mus musculur
AATNLAD

SEQ ID NO: 71 - protein, 9 aa, Mus musculus
QHFWGTPRT

SEQ ID NO: 72 - protein, 6 aa, Mus musculus
FWGTPR

SEQ ID NO: 73 - protein, 5 aa, Mus musculus
SSWMH

SEQ ID NO: 74 - protein, 7 aa, Mus musculus
GYTFTSS

SEQ ID NO: 75 - protein, 8 aa, Mus musculus
GYTFTSSW

SEQ ID NO: 76 - protein, 17 aa, Mus musculus
HIHPNSGISNYNEKFKG

SEQ ID NO: 77 - protein, 8 aa, Mus musculus
IHPNSGIS

SEQ ID NO: 78 - protein, 6 aa, Mus musculus
GGRFDD

SEQ ID NO: 79 - protein, 8 aa, Mus musculus
ARGGRFDD

SEQ ID NO: 80 - protein, 11 aa, Mus musculus
RASQSISDYLH

SEQ ID NO: 81 - protein, 11 aa, Mus musculus
GRFDSQSISDY

SEQ ID NO: 82 - protein, 10 aa, Mus musculus
QNGHSFLMYT

SEQ ID NO: 83 - protein, 7 aa, Mus musculus
GHSFLMY

SEQ ID NO: 84 - protein, 13 aa, Mus musculus
YASQNGHSFLMYT

SEQ ID NO: 85 - protein, 6 aa, mus musculus
SDYAWN

SEQ ID NO: 86 - protein, 8 aa, Mus musculus
GYSITSDY

SEQ ID NO: 87 - protein, 9 aa, Mus musculus
GYSITSDYA

SEQ ID NO: 88 - protein, 16 aa, Mus musculus
YITYSGSTNYNPSLKS

SEQ ID NO: 89 - protein, 11 aa, Mus musculus
CWDYALYAMDC

SEQ ID NO: 90 - protein, 9 aa, mus musculus
WDYALYAMD

SEQ ID NO: 91 - protein, 13 aa, Mus musculus
ARCWDYALYAMDC

SEQ ID NO: 92 - protein, 11 aa, Mus musculus
RTSENIYSYLA

SEQ ID NO: 93 - protein, 7 aa, Mus musculus
NAKTLAE

SEQ ID NO: 94 - protein, 9 aa, Mus musculus
QHHYDTPLT

SEQ ID NO: 95 - protein, 9 aa, mus musculus
NAKHYDTPL

SEQ ID NO: 96 - protein, 9 aa, Mus musculus
QHHYDTPLT

SEQ ID NO: 97 - protein, 5 aa, Mus musculus
NYGMN

SEQ ID NO: 98 - protein, 7 aa, mus musculus
GYTFTNY

SEQ ID NO: 99 - protein, 8 aa, mus musculus
GYTFTNYG

SEQ ID NO: 100 - protein, 17 aa, mus musculus
WINTNTGEPTYAEEFKG

SEQ ID NO: 101 - protein, 8 aa, Mus musculus
INTNTGEP

SEQ ID NO: 102 - protein, 8 aa, Mus musculus
DYLYYFDY

SEQ ID NO: 103 - protein, 6 aa, mus musculus
YLYYFD

SEQ ID NO: 104 - protein, 10 aa, Mus musculus
ARDYLYYFDY

SEQ ID NO: 105 - protein, 11 aa, Mus musculus
KASENVVTYVS

SEQ ID NO: 106 - protein, 7 aa, Mus musculus
SENVVTY

SEQ ID NO: 107 - protein, 6 aa, Mus musculus
ENVVTY

SEQ ID NO: 108 - protein, 7 aa, Mus musculus
GASNRYT

SEQ ID NO: 109 - protein, 9 aa, mus musculus
GQGYSYPYT

SEQ ID NO: 110 - protein, 6 aa, mus musculus
GYSYPY

SEQ ID NO: 111 - protein, 9 aa, mus musculus
GQGYSYPYT

SEQ ID NO: 112 - protein, 120 aa, Artificial
  Chimeric
QVQLVQSGAEVKKPGSSVKVSCKASGYTFSDYVINWVRQAPGQGLEWMGEIYPGSGTNYYNEKFKAKATITADKSTSTAYMELSSLRSEDTAVYYCARRGRYGLYAMDYWGQGTTVTVSS

SEQ ID NO: 113 - protein, 120 aa, Artificial
  Chimeric
QVQLVQSGAEVKKPGSSVKVSCKASGYTFTDYVINWGRQAPGQGLEWIGEIYPGSGTNYYNEKFKAKATITADKSTSTAYMELSSLRSEDTAVYFCARRGRYGLYAMDYWGQGTTVTVSS

SEQ ID NO: 114 - protein, 107 aa, Artificial
  Chimeric
DIQMTQSPSSLSASVGDRVTITCRASQDISNYLNWYQQKPGKAPKLLIYYTSRLHSGVPSRFSGSGSGTDFTFTISSLQPEDIATYFCQQGNTRPWTFGGGTKVEIK

SEQ ID NO: 115 - protein, 122 aa, Artificial
  Chimeric
QVQLQESGPGLVKPSQTLSLTCTVSGYSISSDYAWNWIRQPPGKGLEWIGYITYSGSTSYNPSLESRVTISRDTSKNQFSLKLSSVTAADTAVYYCARGGYYGSSWGVFAYWGQGTLVTVSS

SEQ ID NO: 116 - protein, 122 aa, Artificial
  Chimeric
QVQLQESGPGLVKPSQTLSLTCTVSGYSISSDYAWNWIRQPPGKGLEWMGYITYSGSTSYNPSLESRITISRDTSKNQFSLKLSSVTAADTAVYYCARGGYYGSSWGVFAYWGQGTLVTVSS

SEQ ID NO: 117 - protein, 122 aa, Artificial
  Chimeric
QVQLQESGPGLVKPSQTLSLTCTVSGYSITSDYAWNWIRQPPGKGLEWMGYITYSGSTSYNPSLESRITISRDTSKNQFSLKLSSVTAADTAVYYCARGGYYGSSWGVFAYWGQGTLVTVSS

SEQ ID NO: 118 - protein, 107 aa, Artificial
  Chimeric
DIQMTQSPSSLSASVGDRVTITCRVSENIYSYLAWYQQKPGKAPKLLVYNAKTLAEGVPSRFSGSGSGTDFTLTISSLQPEDFATYYCQHHYGTPWTFGGGTKVEIK

SEQ ID NO: 119 - protein, 116 aa, Artificial
  Chimeric
QVQLVQSGAEVKKPGSSVKVSCKASGYTFSEYTMHWVRQAPGQGLEWMGGISPNIGGTSYNQKFKGRVTITADKSTSTAYMELSSLRSEDTAVYYCARRGGSFDYWGQGTTVTVSS

SEQ ID NO: 120 - protein, 116 aa, Artificial
  Chimeric
QVQLVQSGAEVKKPGSSVKVSCKASGYTFSEYTMHWVRQAPGQGLEWIGGISPNIGGTSYNQKFKGRATITADKSTSTAYMELSSLRSEDTAVYYCARRGGSFDYWGQGTTVTVSS

SEQ ID NO: 121 - protein, 116 aa, Artificial
  Chimeric
QVQLVQSGAEVKKPGSSVKVSCKASGYTFSEYTMHWVRQAPGQGLEWIGGISPNIGGTSYNQKFKGRATLTADKSTSTAYMELSSLRSEDTAVYYCARRGGSFDYWGQGTTVTVSS

SEQ ID NO: 122 - protein, 107 aa, Artificial
  Chimeric
EIVMTQSPATLSVSPGERATLSCRASQSISDYLHWYQQKPGQAPRLLIKYASQSISGIPARFSGSGSGTDFTLTISSLEPEDFAVYYCQNGHSFPLTFGQGTKLEIK

SEQ ID NO: 123 - protein, 117 aa, Artificial
  Chimeric
QVQLVQSGAEVKKPGASVKVSCKASGYTFTSFTMHWVRQAPGQGLEWIGYINPSSGYTEYNQKFKDRVTITADKSTSTAYMELSSLRSEDTAVYYCVRGSSRGFDYWGQGTLVTVSS

SEQ ID NO: 124 - protein, 117 aa, Artificial
  Chimeric
QVQLVQSGAEVKKPGASVKVSCKASGYTFTSFTMHWVRQAPGQGLEWIGYINPSSGYTEYNQKFKDRTTITADKSTSTAYMELSSLRSEDTAVYYCVRGSSRGFDYWGQGTLVTVSS

SEQ ID NO: 125 - protein, 117 aa, Artificial
  Chimeric
QVQLVQSGAEVKKPGASVKVSCKASGYTFTSFTMHWVRQAPGQGLEWIGYINPSSGYTEYNQKFKDRTTLTADKSTSTAYMELSSLRSEDTAVYYCVRGSSRGFDYWGQGTLVTVSS

SEQ ID NO: 126 - protein, 107 aa, Artificial
  Chimeric
DIQMTQSPSSLSASVGDRVTITCRASENIYSNLAWFQQKPGKAPKLLVYAATNLADGVPSRFSGSGSGTDYTLTISSLQPEDFATYYCQHFWGTPRTFGGGTKVEIK

SEQ ID NO: 127 - protein, 120 aa, Artificial
  Chimeric
QVQLQESGPGLVKPSQTLSLTCTVSGGSISSDYAWNWIRQPPGKGLEWIGYITYSGSTNYNPSLKSRVTISRDTSKNQFSLKLSSVTAADTAVYYCARCWDYALYAMDCWGQGTTVTVSS

SEQ ID NO: 128 - protein, 120 aa, Artificial
  Chimeric
QVQLQESGPGLVKPSQTLSLTCTVSGYSISSDYAWNWIRQPPGKGLEWIGYITYSGSTNYNPSLKSRVTISRDTSKNQFSLKLSSVTAADTAVYYCARCWDYALYAMDCWGQGTTVTVSS

SEQ ID NO: 129 - protein, 120 aa, Artificial
  Chimeric
QVQLQESGPGLVKPSQTLSLTCTVSGYSISSDYAWNWIRQPPGKGLEWMGYITYSGSTNYNPSLKSRITISRDTSKNQFSLKLSSVTAADTAVYYCARCWDYALYAMDCWGQGTTVTVSS

SEQ ID NO: 130 - protein, 107 aa, Artificial
  Chimeric
DIQMTQSPSSLSASVGDRVTITCRTSENIYSYLAWCQQKPGKAPKLLIYNAKTLAEGVPSRFSGSGSGTDFTLTISSLQPEDFATYYCQHHYDTPLTFGQGTKLEIK

SEQ ID NO: 131 - protein, 107 aa, Artificial
  Chimeric
DIQMTQSPSSLSASVGDRVTITCRTSENIYSYLAWCQQKPGKAPKLLVYNAKTLAEGVPSRFSGSGSGTDFTLTISSLQPEDFATYYCQHHYDTPLTFGQGTKLEIK

SEQ ID NO: 132 - protein, 120 aa, artificial [sequence omitted]

SEQ ID NO: 133 - protein, 107 aa, artificial [sequence omitted]

SEQ ID NO: 134 - protein, 120 aa, artificial
  synthetic
QVQLQQSGPELVKPGASLKLSCTASGFNIKDTYIHWVKQRPEQGLEWIGRIYPTNGYTRYDPKFQDKATITADTSSNTAYLQVSRLTSEDTAVYYCSRWGGDGFYAMDYWGQGASVTVSS

SEQ ID NO: 135 - protein, 107 aa, artificial
  synthetic
DIVMTQSHKFMSTSVGDRVSITCKASQDVNTAVAWYQQKPGHSPKLLIYSASFRYTGVPDRFTGSRSGTDFTFTISSVQAEDLAVYYCQQHYTTPPTFGGGTKVEIK

SEQ ID NO: 136 - protein, 124 aa, artificial
  synthetic
QVQLQQSGAELVRPGSSVKISCKASGYAFSSYWMNWVKQRPGQGLEWIGQIWPGDGDTNYNGKFKGKATLTADESSSTAYMQLSSLASEDSAVYFCARRETTTVGRYYYAMDYWGQGTTVTVSS

SEQ ID NO: 137 - protein, 111 aa, artificial
  synthetic
DIQLTQSPASLAVSLGQRATISCKASQSVDYDGDSYLNWYQQIPGQPPKLLIYDASNLVSGIPPRFSGSGSGTDFTLNIHPVEKVDAATYHCQQSTEDPWTFGGGTKLEIK

SEQ ID NO: 138 - protein, 121 aa, artificial [sequence omitted]

SEQ ID NO: 139 - protein, 106 aa, artificial [sequence omitted]

SEQ ID NO: 140 - protein, 119 aa, artificial
  synthetic
QVQLVQSGAEVKKPGSSVKVSCKASGYAFSYSWINWVRQAPGQGLEWMGRIFPGDGDTDYNGKFKGRVTITADKSTSTAYMELSSLRSEDTAVYYCARNVFDGYWLVYWGQGTLVTVSS

SEQ ID NO: 141 - protein, 112 aa, artificial
  synthetic
DIVMTQTPLSLPVTPGEPASISCRSSKSLLHSNGITYLYWYLQKPGQSPQLLIYQMSNLVSGVPDRFSGSGSGTDFTLKISRVEAEDVGVYYCAQNLELPYTFGGGTKVEIK

SEQ ID NO: 142 - protein, 119 aa, artificial
  synthetic
QVQLKQSGPGLVQPSQSLSITCTVSGFSLTNYGVHWVRQSPGKGLEWLGVIWSGGNTDYNTPFTSRLSINKDNSKSQVFFKMNSLQSNDTAIYYCARALTYYDYEFAYWGQGTLVTVSA

SEQ ID NO: 143 - protein, 107 aa, artificial
  synthetic
DILLTQSPVILSVSPGERVSFSCRASQSIGTNIHWYQQRTNGSPRLLIKYASESISGIPSRFSGSGSGTDFTLSINSVESEDIADYYCQQNNNWPTTFGAGTKLELK

SEQ ID NO: 144 - protein, 119 aa, artificial [sequence omitted]

SEQ ID NO: 145 - protein, 107 aa, artificial [sequence omitted]

SEQ ID NO: 146 - protein, 123 aa, artificial [sequence omitted]

SEQ ID NO: 147 - protein, 111 aa, artificial
  synthetic
DIQMTQSPSSLSASVGDRVTITCRSSQNIVHSNGNTYLDWYQQTPGKAPKLLIYKVSNRFSGVPSRFSGSGSGTDFTFTISSLQPEDIATYYCFQYSHVPWTFGQGTKLQI

SEQ ID NO: 148 - protein, 121 aa, artificial [sequence omitted]

SEQ ID NO: 149 - protein, 107 aa, artificial [sequence omitted]

SEQ ID NO: 150 - protein, 116 aa, artificial
  synthetic
QVQLQESGPGLVKPSQTLSLTCTVSGYSISSDFAWNWIRQPPGKGLEWMGYISYSGNTRYQPSLKSRITISRDTSKNQFFLKLNSVTAADTATYYCVTAGRGFPYWGQGTLVTVSS

SEQ ID NO: 151 - protein, 107 aa, artificial
  synthetic
DIQMTQSPSSMSVSVGDRVTITCHSSQDINSNIGWLQQKPGKSFKGLIYHGTNLDDGVPSRFSGSGSGTDYTLTISSLQPEDFATYYCVQYAQFPWTFGGGTKLEIK

SEQ ID NO: 152 - protein, 121 aa, artificial
  synthetic
QVQLVQSGAEVKKPGSSVKVSCKASGGTFSNYWMHWVRQAPGQGLEWMGATYRGHSDTYYNQKFKGRVTITADKSTSTAYMELSSLRSEDTAVYYCARGAIYDGYDVLDNWGQGTLVTVSS

SEQ ID NO: 153 - protein, 107 aa, artificial
  synthetic
DIQMTQSPSSLSASVGDRVTITCSASQDISNYLNWYQQKPGKAPKLLIYYTSNLHSGVPSRFSGSGSGTDFTLTISSLQPEDFATYYCQQYRKLPWTFGQGTKLEIK

SEQ ID NO: 154 - protein, 121 aa, artificial
  synthetic
QVQLVQSGAEVKKPGASVKVSCKASGYTFTNHIIHWVRQAPGQCLEWMGYINPYPGYHAYNEKFQGRATMTSDTSTSTVYMELSSLRSEDTAVYYCARDGYYRDTDVLDYWGQGTLVTVSS

SEQ ID NO: 155 - protein, 107 aa, artificial
  synthetic
DIQMTQSPSSLSASVGDRVTITCQASQDISNYLNWYQQKPGKAPKLLIYYTSRLHTGVPSRFSGSGSGTDFTFTISSLEPEDIATYYCQQGNTLPWTFGCGTKVEIK

SEQ ID NO: 156 - protein, 98 aa, homo sapiens
ASTKGPSVFPLAPSSKSTSGGTAALGCLVKDYFPEPVTVSWNSGALTSGVHTFPAVLQSSGLYSLSSVVTVPSSSLGTQTYICNVNHKPSNTKVDKRV

SEQ ID NO: 157 - protein, 108 aa, homo sapiens
ASTKGPSVFPLAPSSKSTSGGTAALGCLVKDYFPEPVTVSWNSGALTSGVHTFPAVLQSSGLYSLSSVVTVPSSSLGTQTYICNVNHKPSNTKVDKRVEPKSCDKTHS

SEQ ID NO: 158 - protein, 108 aa, homo sapiens
ASTKGPSVFPLAPSSKSTSGGTAALGCLVKDYFPEPVTVSWNSGALTSGVHTFPAVLQSSGLYSLSSVVTVPSSSLGTQTYICNVNHKPSNTKVDKRVEPKSCDKTHT

SEQ ID NO: 159 - protein, 106 aa, homo sapiens
TVAAPSVFIFPPSDEQLKSGTASVVCLLNNFYPREAKVQWKVDNALQSGNSQESVTEQDSKDSTYSLSSTLTLSKADYEKHKVYACEVTHQGLSSPVTKSFNRGEC

SEQ ID NO: 160 - protein, 216 aa, homo sapiens
APELLGGPSVFLFPPKPKDTLMISRTPEVTCVVVDVSHEDPEVKFNWYVDGVEVHNAKTKPREEQYNSTYRVVSVLTVLHQDWLNGKEYKCKVSNKALPAPIEKTISKAKGQPREPQVYTLPPSREEMTKNQVSLTCLVKGFYPSDIAVEWESNGQPENNYKTTPPVLDSDGSFFLYSKLTVDKSRWQQGNVFSCSVMHEALHNHYTQKSLSLSPG

SEQ ID NO: 161 - protein, 216 aa, artificial; identical to SEQ ID NO: 160
  synthetic

SEQ ID NO: 162 - protein, 216 aa, artificial
  synthetic
APELLGGPSVFLFPPKPKDTLMISRTPEVTCVVVDVSHEDPEVKFNWYVDGVEVHNAKTKPREEQYNSTYRVVSVLTVLHQDWLNGKEYKCKVSNKALPAPIEKTISKAKGQPREPQVYTLPPSREEMTKNQVSLTCLVKGFYPSDIAVEWESNGQPENNYKTTPPVLDSDGSFFLYSKLTVDKSRWQQGNVFSCSVMHEALHNRFTQKSLSLSPG

SEQ ID NO: 163 - protein, 329 aa, artificial
  synthetic
ASTKGPSVFPLAPSSKSTSGGTAALGCLVKDYFPEPVTVSWNSGALTSGVHTFPAVLQSSGLYSLSSVVTVPSSSLGTQTYICNVNHKPSNTKVDKRVEPKSCDKTHTCPPCPAPEAEGGPSVFLFPPKPKDTLMISRTPEVTCVVVDVSHEDPEVKFNWYVDGVEVHNAKTKPREEQYNSTYRVVSVLTVLHQDWLNGKEYKCKVSNKALPASIEKTISKAKGQPREPQVYTLPPSREEMTKNQVSLTCLVKGFYPSDIAVEWESNGQPENNYKTTPPVLDSDGSFFLYSKLTVDKSRWQQGNVFSCSVMHEALHNHYTQKSLSLSPG

SEQ ID NO: 164 - protein, 329 aa, artificial
  synthetic
ASTKGPSVFPLAPSSKSTSGGTAALGCLVKDYFPEPVTVSWNSGALTSGVHTFPAVLQSSGLYSLSSVVTVPSSSLGTQTYICNVNHKPSNTKVDKRVEPKSCDKTHTCPPCPAPEFEGGPSVFLFPPKPKDTLMISRTPEVTCVVVDVSHEDPEVKFNWYVDGVEVHNAKTKPREEQYNSTYRVVSVLTVLHQDWLNGKEYKCKVSNKALPASIEKTISKAKGQPREPQVYTLPPSREEMTKNQVSLTCLVKGFYPSDIAVEWESNGQPENNYKTTPPVLDSDGSFFLYSKLTVDKSRWQQGNVFSCSVMHEALHNHYTQKSLSLSPG

SEQ ID NO: 165 - protein, 329 aa, artificial
  synthetic
ASTKGPSVFPLAPSSKSTSGGTAALGCLVKDYFPEPVTVSWNSGALTSGVHTFPAVLQSSGLYSLSSVVTVPSSSLGTQTYICNVNHKPSNTKVDKRVEPKSCDKTHTCPPCPAPEAEGAPSVFLFPPKPKDTLMISRTPEVTCVVVDVSHEDPEVKFNWYVDGVEVHNAKTKPREEQYNSTYRVVSVLTVLHQDWLNGKEYKCKVSNKALPSSIEKTISKAKGQPREPQVYTLPPSREEMTKNQVSLTCLVKGFYPSDIAVEWESNGQPENNYKTTPPVLDSDGSFFLYSKLTVDKSRWQQGNVFSCSVMHEALHNHYTQKSLSLSPG

SEQ ID NO: 166 - protein, 13 aa, homo sapiens
THTCPPCPAPELL

SEQ ID NO: 167 - protein, 15 aa, homo sapiens
NASSMCVPSPAPELL

SEQ ID NO: 168 - protein, 13 aa, homo sapiens
THTSPPSPAPELL

SEQ ID NO: 169 - protein, 13 aa, artificial
  synthetic
THTCSSCPAPELL

SEQ ID NO: 170 - protein, 13 aa, artificial
  synethetic
THTCSSCPAPELL

SEQ ID NO: 171 - protein, 5 aa, artificial
  synthetic
GSSSS

SEQ ID NO: 172 - protein, 10 aa, artificial
  synthetic
GSSSSGSSSS

SEQ ID NO: 173 - protein, 12 aa, artificial
  synthetic
GSSSSGSSSSGS

SEQ ID NO: 174 - protein, 15 aa, artificial
  synthetic
GSSSSGSSSSGSSSS

SEQ ID NO: 175 - protein, 446 aa, artificial
  synthetic
DIVMTQTPLSLPVTPGEPASISCRSSKSLLHSNGITYLYWYLQKPGQSPQLLIYQMSNLVSGVPDRFSGSGSGTDFTLKISRVEAEDVGVYYCAQNLELPYTFGGGTKVEIKRTVAAPSVFIFPPSDEQLKSGTASVVCLLNNFYPREAKVQWKVDNALQSGNSQESVTEQDSKDSTYSLSSTLTLSKADYEKHKVYACEVTHQGLSSPVTKSFNRGECDKTHTCPPCPAPELLGGPSVFLFPPKPKDTLMISRTPEVTCVVVDVSHEDPEVKFNWYVDGVEVHNAKTKPREEQYNSTYRVVSVLTVLHQDWLNGKEYKCKVSNKALPAPIEKTISKAKGQPREPQVYTLPPSREEMTKNQVSLTCLVKGFYPSDIAVEWESNGQPENNYKTTPPVLDSDGSFFLYSKLTVDKSRWQQGNVFSCSVMHEALHNHYTQKSLSLSPGK

SEQ ID NO: 176 - protein, 679 aa, artificial
  synthetic
QVQLVQSGAEVKKPGSSVKVSCKASGYAFSYSWINWVRQAPGQGLEWMGRIFPGDGDTDYNGKFKGRVTITADKSTSTAYMELSSLRSEDTAVYYCARNVFDGYWLVYWGQGTLVTVSSASTKGPSVFPLAPSSKSTSGGTAALGCLVKDYFPEPVTVSWNSGALTSGVHTFPAVLQSSGLYSLSSVVTVPSSSLGTQTYICNVNHKPSNTKVDKRVEPKSCDKTHTCPPCPAPELLGGPSVFLFPPKPKDTLMISRTPEVTCVVVDVSHEDPEVKFNWYVDGVEVHNAKTKPREEQYNSTYRVVSVLTVLHQDWLNGKEYKCKVSNKALPAPIEKTISKAKGQPREPQVYTLPPSREEMTKNQVSLTCLVKGFYPSDIAVEWESNGQPENNYKTTPPVLDSDGSFFLYSKLTVDKSRWQQGNVFSCSVMHEALHNHYTQKSLSLSPGSTGSQVQLVQSGAEVKKPGSSVKVSCKASGYTFSDYVINWVRQAPGQGLEWMGEIYPGSGTNYYNEKFKAKATITADKSTSTAYMELSSLRSEDTAVYYCARRGRYGLYAMDYWGQGTTVTVSSRTVAAPSVFIFPPSDEQLKSGTASVVCLLNNFYPREAKVQWKVDNALQSGNSQESVTEQDSKDSTYSLSSTLTLSKADYEKHKVYACEVTHQGLSSPVTKSFNRGEC

SEQ ID NO: 177 - protein, 358 aa, artificial
  synthetic
DIQMTQSPSSLSASVGDRVTITCRASQDISNYLNWYQQKPGKAPKLLIYYTSRLHSGVPSRFSGSGSGTDFTFTISSLQPEDIATYFCQQGNTRPWTFGGGTKVEIKASTKGPSVFPLAPSSKSTSGGTAALGCLVKDYFPEPVTVSWNSGALTSGVHTFPAVLQSSGLYSLSSVVTVPSSSLGTQTYICNVNHKPSNTKVDKRVEPKSCDKTHSGSSSSGSSSSAPASSSTKKTQLQLEHLLLDLQMILNGINNYKNPKLTRMLTAKFAMPKKATELKHLQCLEEELKPLEEVLNGAQSKNFHLRPRDLISNINVIVLELKGSETTFMCEYADETATIVEFLNRWITFAQSIISTLT

SEQ ID NO: 178 - protein, 446 aa, artificial; identical to SEQ ID NO: 175
  synthetic

SEQ ID NO: 179 - protein, 679 aa, artificial; identical to SEQ ID NO: 176
  synthetic

SEQ ID NO: 180 - protein, 353 aa, artificial
  synthetic
DIQMTQSPSSLSASVGDRVTITCRASQDISNYLNWYQQKPGKAPKLLIYYTSRLHSGVPSRFSGSGSGTDFTFTISSLQPEDIATYFCQQGNTRPWTFGGGTKVEIKASTKGPSVFPLAPSSKSTSGGTAALGCLVKDYFPEPVTVSWNSGALTSGVHTFPAVLQSSGLYSLSSVVTVPSSSLGTQTYICNVNHKPSNTKVDKRVEPKSCDKTHSGSSSSAPASSSTKKTQLQLEHLLLDLQMILNGINNYKNPKLTRMLTAKFAMPKKATELKHLQCLEEELKPLEEVLNGAQSKNFHLRPRDLISNINVIVLELKGSETTFMCEYADETATIVEFLNRWITFAQSIISTLT

SEQ ID NO: 181 - protein, 446 aa, artificial; identical to SEQ ID NO: 175
  synthetic

SEQ ID NO: 182 - protein, 679 aa, artificial; identical to SEQ ID NO: 176
  synthetic

SEQ ID NO: 183 - protein, 363 aa, artificial
  synthetic
DIQMTQSPSSLSASVGDRVTITCRASQDISNYLNWYQQKPGKAPKLLIYYTSRLHSGVPSRFSGSGSGTDFTFTISSLQPEDIATYFCQQGNTRPWTFGGGTKVEIKASTKGPSVFPLAPSSKSTSGGTAALGCLVKDYFPEPVTVSWNSGALTSGVHTFPAVLQSSGLYSLSSVVTVPSSSLGTQTYICNVNHKPSNTKVDKRVEPKSCDKTHSGSSSSGSSSSGSSSSAPASSSTKKTQLQLEHLLLDLQMILNGINNYKNPKLTRMLTAKFAMPKKATELKHLQCLEEELKPLEEVLNGAQSKNFHLRPRDLISNINVIVLELKGSETTFMCEYADETATIVEFLNRWITFAQSIISTLT

SEQ ID NO: 184 - protein, 446 aa, artificial
  synthetic
DIVMTQTPLSLPVTPGEPASISCRSSKSLLHSNGITYLYWYLQKPGQSPQLLIYQMSNLVSGVPDRFSGSGSGTDFTLKISRVEAEDVGVYYCAQNLELPYTFGGGTKVEIKRTVAAPSVFIFPPSDEQLKSGTASVVCLLNNFYPREAKVQWKVDNALQSGNSQESVTEQDSKDSTYSLSSTLTLSKADYEKHKVYACEVTHQGLSSPVTKSFNRGECDKTHTCPPCPAPELLGGPSVFLFPPKPKDTLMISRTPEVTCVVVDVSHEDPEVKFNWYVDGVEVHNAKTKPREEQYSSTYRVVSVLTVLHQDWLNGKEYKCKVSNKALPAPIEKTISKAKGQPREPQVYTLPPSREEMTKNQVSLTCLVKGFYPSDIAVEWESNGQPENNYKTTPPVLDSDGSFFLYSKLTVDKSRWQQGNVFSCSVMHEALHNHYTQKSLSLSPGK

SEQ ID NO: 185 - protein, 679 aa, artificial
  synthetic
QVQLVQSGAEVKKPGSSVKVSCKASGYAFSYSWINWVRQAPGQGLEWMGRIFPGDGDTDYNGKFKGRVTITADKSTSTAYMELSSLRSEDTAVYYCARNVFDGYWLVYWGQGTLVTVSSASTKGPSVFPLAPSSKSTSGGTAALGCLVKDYFPEPVTVSWNSGALTSGVHTFPAVLQSSGLYSLSSVVTVPSSSLGTQTYICNVNHKPSNTKVDKRVEPKSCDKTHTCPPCPAPELLGGPSVFLFPPKPKDTLMISRTPEVTCVVVDVSHEDPEVKFNWYVDGVEVHNAKTKPREEQYSSTYRVVSVLTVLHQDWLNGKEYKCKVSNKALPAPIEKTISKAKGQPREPQVYTLPPSREEMTKNQVSLTCLVKGFYPSDIAVEWESNGQPENNYKTTPPVLDSDGSFFLYSKLTVDKSRWQQGNVFSCSVMHEALHNHYTQKSLSLSPGSTGSQVQLVQSGAEVKKPGSSVKVSCKASGYTFSDYVINWVRQAPGQGLEWMGEIYPGSGTNYYNEKFKAKATITADKSTSTAYMELSSLRSEDTAVYYCARRGRYGLYAMDYWGQGTTVTVSSRTVAAPSVFIFPPSDEQLKSGTASVVCLLNNFYPREAKVQWKVDNALQSGNSQESVTEQDSKDSTYSLSSTLTLSKADYEKHKVYACEVTHQGLSSPVTKSFNRGEC

SEQ ID NO: 186 - protein, 358 aa, artificial; identical to SEQ ID NO: 177
  synthetic

SEQ ID NO: 187 - protein, 446 aa, artificial; identical to SEQ ID NO: 184
  synthetic

SEQ ID NO: 188 - protein, 679 aa, artificial; identical to SEQ ID NO: 185
  synthetic

SEQ ID NO: 189 - protein, 357 aa, artificial
  synthetic
DIQMTQSPSSLSASVGDRVTITCRASQDISNYLNWYQQKPGKAPKLLIYYTSRLHSGVPSRFSGSGSGTDFTFTISSLQPEDIATYFCQQGNTRPWTFGGGTKVEIKASTKGPSVFPLAPSSKSTSGGTAALGCLVKDYFPEPVTVSWNSGALTSGVHTFPAVLQSSGLYSLSSVVTVPSSSLGTQTYICNVNHKPSNTKVDKRVEPKSCDKTHSGSSSSGSSSSGSSSSTKKTQLQLEHLLLDLQMILNGINNYKNPKLTAMLTKKFYMPKKATELKHLQCLEEELKPLEEVLNLAQSKNFHLRPRDLISNINVIVLELKGSETTFMCEYADETATIVEFLNRWITFCQSIISTLT

SEQ ID NO: 190 - protein, 446 aa, artificial; identical to SEQ ID NO: 184
  synthetic

SEQ ID NO: 191 - protein, 679 aa, artificial; identical to SEQ ID NO: 185
  synthetic

SEQ ID NO: 192 - protein, 357 aa, artificial
  synthetic
DIQMTQSPSSLSASVGDRVTITCRASQDISNYLNWYQQKPGKAPKLLIYYTSRLHSGVPSRFSGSGSGTDFTFTISSLQPEDIATYFCQQGNTRPWTFGGGTKVEIKASTKGPSVFPLAPSSKSTSGGTAALGCLVKDYFPEPVTVSWNSGALTSGVHTFPAVLQSSGLYSLSSVVTVPSSSLGTQTYICNVNHKPSNTKVDKRVEPKSCDKTHSGSSSSGSSSSGSSSSTKKTQLQLEHLLLDLQMILNGINNYKNPKLTAMLAKKFYMPKKATELKHLQCLEEELKPLEEVLNLAQSKNFHLRPRDLISNINVIVLELKGSETTFMCEYADETATIVEFLNRWITFCQSIISTLT

SEQ ID NO: 193 - protein, 446 aa, artificial; identical to SEQ ID NO: 175
  synthetic

SEQ ID NO: 194 - protein, 676 aa, artificial
  synthetic
QVQLVQSGAEVKKPGSSVKVSCKASGYAFSYSWINWVRQAPGQGLEWMGRIFPGDGDTDYNGKFKGRVTITADKSTSTAYMELSSLRSEDTAVYYCARNVFDGYWLVYWGQGTLVTVSSASTKGPSVFPLAPSSKSTSGGTAALGCLVKDYFPEPVTVSWNSGALTSGVHTFPAVLQSSGLYSLSSVVTVPSSSLGTQTYICNVNHKPSNTKVDKRVEPKSCDKTHTCPPCPAPELLGGPSVFLFPPKPKDTLMISRTPEVTCVVVDVSHEDPEVKFNWYVDGVEVHNAKTKPREEQYNSTYRVVSVLTVLHQDWLNGKEYKCKVSNKALPAPIEKTISKAKGQPREPQVYTLPPSREEMTKNQVSLTCLVKGFYPSDIAVEWESNGQPENNYKTTPPVLDSDGSFFLYSKLTVDKSRWQQGNVFSCSVMHEALHNHYTQKSLSLSPGSTGSQVQLVQSGAEVKKPGASVKVSCKASGYTFTSFTMHWVRQAPGQGLEWIGYINPSSGYTEYNQKFKDRVTITADKSTSTAYMELSSLRSEDTAVYYCVRGSSRGFDYWGQGTLVTVSSRTVAAPSVFIFPPSDEQLKSGTASVVCLLNNFYPREAKVQWKVDNALQSGNSQESVTEQDSKDSTYSLSSTLTLSKADYEKHKVYACEVTHQGLSSPVTKSFNRGEC

SEQ ID NO: 195 - protein, 358 aa, artificial
  synthetic
DIQMTQSPSSLSASVGDRVTITCRASENIYSNLAWFQQKPGKAPKLLVYAATNLADGVPSRFSGSGSGTDYTLTISSLQPEDFATYYCQHFWGTPRTFGGGTKVEIKASTKGPSVFPLAPSSKSTSGGTAALGCLVKDYFPEPVTVSWNSGALTSGVHTFPAVLQSSGLYSLSSVVTVPSSSLGTQTYICNVNHKPSNTKVDKRVEPKSCDKTHSGSSSSGSSSSAPASSSTKKTQLQLEHLLLDLQMILNGINNYKNPKLTRMLTAKFAMPKKATELKHLQCLEEELKPLEEVLNGAQSKNFHLRPRDLISNINVIVLELKGSETTFMCEYADETATIVEFLNRWITFAQSIISTLT

SEQ ID NO: 196 - protein, 446 aa, artificial; identical to SEQ ID NO: 184
  synthetic

SEQ ID NO: 197 - protein, 676 aa, artificial
  synthetic
QVQLVQSGAEVKKPGSSVKVSCKASGYAFSYSWINWVRQAPGQGLEWMGRIFPGDGDTDYNGKFKGRVTITADKSTSTAYMELSSLRSEDTAVYYCARNVFDGYWLVYWGQGTLVTVSSASTKGPSVFPLAPSSKSTSGGTAALGCLVKDYFPEPVTVSWNSGALTSGVHTFPAVLQSSGLYSLSSVVTVPSSSLGTQTYICNVNHKPSNTKVDKRVEPKSCDKTHTCPPCPAPELLGGPSVFLFPPKPKDTLMISRTPEVTCVVVDVSHEDPEVKFNWYVDGVEVHNAKTKPREEQYSSTYRVVSVLTVLHQDWLNGKEYKCKVSNKALPAPIEKTISKAKGQPREPQVYTLPPSREEMTKNQVSLTCLVKGFYPSDIAVEWESNGQPENNYKTTPPVLDSDGSFFLYSKLTVDKSRWQQGNVFSCSVMHEALHNHYTQKSLSLSPGSTGSQVQLVQSGAEVKKPGASVKVSCKASGYTFTSFTMHWVRQAPGQGLEWIGYINPSSGYTEYNQKFKDRVTITADKSTSTAYMELSSLRSEDTAVYYCVRGSSRGFDYWGQGTLVTVSSRTVAAPSVFIFPPSDEQLKSGTASVVCLLNNFYPREAKVQWKVDNALQSGNSQESVTEQDSKDSTYSLSSTLTLSKADYEKHKVYACEVTHQGLSSPVTKSFNRGEC

SEQ ID NO: 198 - protein, 358 aa, artificial; identical to SEQ ID NO: 195
  synthetic

SEQ ID NO: 199 - protein, 446 aa, artificial; identical to SEQ ID NO: 175
  synthetic

SEQ ID NO: 200 - protein, 680 aa, artificial
  synthetic
QVQLVQSGAEVKKPGSSVKVSCKASGYAFSYSWINWVRQAPGQGLEWMGRIFPGDGDTDYNGKFKGRVTITADKSTSTAYMELSSLRSEDTAVYYCARNVFDGYWLVYWGQGTLVTVSSASTKGPSVFPLAPSSKSTSGGTAALGCLVKDYFPEPVTVSWNSGALTSGVHTFPAVLQSSGLYSLSSVVTVPSSSLGTQTYICNVNHKPSNTKVDKRVEPKSCDKTHTCPPCPAPELLGGPSVFLFPPKPKDTLMISRTPEVTCVVVDVSHEDPEVKFNWYVDGVEVHNAKTKPREEQYNSTYRVVSVLTVLHQDWLNGKEYKCKVSNKALPAPIEKTISKAKGQPREPQVYTLPPSREEMTKNQVSLTCLVKGFYPSDIAVEWESNGQPENNYKTTPPVLDSDGSFFLYSKLTVDKSRWQQGNVFSCSVMHEALHNHYTQKSLSLSPGSTGSQVQLVQSGAEVKKPGSSVKVSCKASGYTFSDYVINWVRQAPGQGLEWMGEIYPGSGTNYYNEKFKAKATITADKSTSTAYMELSSLRSEDTAVYYCARRGRYGLYAMDYWGQGTTVTVSSASTKGPSVFPLAPSSKSTSGGTAALGCLVKDYFPEPVTVSWNSGALTSGVHTFPAVLQSSGLYSLSSVVTVPSSSLGTQTYICNVNHKPSNTKVDKRVEPKSCDKTHS

SEQ ID NO: 201 - protein, 357 aa, artificial
  synthetic
DIQMTQSPSSLSASVGDRVTITCRASQDISNYLNWYQQKPGKAPKLLIYYTSRLHSGVPSRFSGSGSGTDFTFTISSLQPEDIATYFCQQGNTRPWTFGGGTKVEIKRTVAAPSVFIFPPSDEQLKSGTASVVCLLNNFYPREAKVQWKVDNALQSGNSQESVTEQDSKDSTYSLSSTLTLSKADYEKHKVYACEVTHQGLSSPVTKSFNRGECGSSSSGSSSSAPASSSTKKTQLQLEHLLLDLQMILNGINNYKNPKLTRMLTAKFAMPKKATELKHLQCLEEELKPLEEVLNGAQSKNFHLRPRDLISNINVIVLELKGSETTFMCEYADETATIVEFLNRWITFAQSIISTLT

SEQ ID NO: 202 - protein, 446 aa, artificial; identical to SEQ ID NO: 184
  synthetic

SEQ ID NO: 203 - protein, 680 aa, artificial
  synthetic
QVQLVQSGAEVKKPGSSVKVSCKASGYAFSYSWINWVRQAPGQGLEWMGRIFPGDGDTDYNGKFKGRVTITADKSTSTAYMELSSLRSEDTAVYYCARNVFDGYWLVYWGQGTLVTVSSASTKGPSVFPLAPSSKSTSGGTAALGCLVKDYFPEPVTVSWNSGALTSGVHTFPAVLQSSGLYSLSSVVTVPSSSLGTQTYICNVNHKPSNTKVDKRVEPKSCDKTHTCPPCPAPELLGGPSVFLFPPKPKDTLMISRTPEVTCVVVDVSHEDPEVKFNWYVDGVEVHNAKTKPREEQYSSTYRVVSVLTVLHQDWLNGKEYKCKVSNKALPAPIEKTISKAKGQPREPQVYTLPPSREEMTKNQVSLTCLVKGFYPSDIAVEWESNGQPENNYKTTPPVLDSDGSFFLYSKLTVDKSRWQQGNVFSCSVMHEALHNHYTQKSLSLSPGSTGSQVQLVQSGAEVKKPGSSVKVSCKASGYTFSDYVINWVRQAPGQGLEWMGEIYPGSGTNYYNEKFKAKATITADKSTSTAYMELSSLRSEDTAVYYCARRGRYGLYAMDYWGQGTTVTVSSASTKGPSVFPLAPSSKSTSGGTAALGCLVKDYFPEPVTVSWNSGALTSGVHTFPAVLQSSGLYSLSSVVTVPSSSLGTQTYICNVNHKPSNTKVDKRVEPKSCDKTHS

SEQ ID NO: 204 - protein, 357 aa, artificial; identical to SEQ ID NO: 201
  synthetic

SEQ ID NO: 205 - protein, 446 aa, artificial
  synthetic
DIVMTQTPLSLPVTPGEPASISCRSSKSLLHSNGITYLYWYLQKPGQSPQLLIYQMSNLVSGVPDRFSGSGSGTDFTLKISRVEAEDVGVYYCAQNLELPYTFGGGTKVEIKRTVAAPSVFIFPPSDEQLKSGTASVVCLLNNFYPREAKVQWKVDNALQSGNSQESVTEQDSKDSTYSLSSTLTLSKADYEKHKVYACEVTHQGLSSPVTKSFNRGECDKTHTCPPCPAPELLGGPSVFLFPPKPKDTLMISRTPEVTCVVVDVSHEDPEVKFNWYVDGVEVHNAKTKPREEQYNSTYRVVSVLTVLHQDWLNGKEYKCKVSNKALPAPIEKTISKAKGQPREPQVYTLPPSREEMTKNQVSLTCLVKGFYPSDIAVEWESNGQPENNYKTTPPVLDSDGSFFLYSKLTVDKSRWQQGNVFSCSVMHEALHNRFTQKSLSLSPGK

SEQ ID NO: 206 - protein, 839 aa, artificial
  synthetic
QVQLVQSGAEVKKPGSSVKVSCKASGYAFSYSWINWVRQAPGQGLEWMGRIFPGDGDTDYNGKFKGRVTITADKSTSTAYMELSSLRSEDTAVYYCARNVFDGYWLVYWGQGTLVTVSSASTKGPSVFPLAPSSKSTSGGTAALGCLVKDYFPEPVTVSWNSGALTSGVHTFPAVLQSSGLYSLSSVVTVPSSSLGTQTYICNVNHKPSNTKVDKRVEPKSCDKTHTCPPCPAPELLGGPSVFLFPPKPKDTLMISRTPEVTCVVVDVSHEDPEVKFNWYVDGVEVHNAKTKPREEQYNSTYRVVSVLTVLHQDWLNGKEYKCKVSNKALPAPIEKTISKAKGQPREPQVYTLPPSREEMTKNQVSLTCLVKGFYPSDIAVEWESNGQPENNYKTTPPVLDSDGSFFLYSKLTVDKSRWQQGNVFSCSVMHEALHNHYTQKSLSLSPGSTGSQVQLVQSGAEVKKPGSSVKVSCKASGYTFSDYVINWVRQAPGQGLEWMGEIYPGSGTNYYNEKFKAKATITADKSTSTAYMELSSLRSEDTAVYYCARRGRYGLYAMDYWGQGTTVTVSSVEGGSGGSGGSGGSGGVDDIQMTQSPSSLSASVGDRVTITCRASQDISNYLNWYQQKPGKAPKLLIYYTSRLHSGVPSRFSGSGSGTDFTFTISSLQPEDIATYFCQQGNTRPWTFGGGTKVEIKGSSSSGSSSSAPASSSTKKTQLQLEHLLLDLQMILNGINNYKNPKLTRMLTAKFAMPKKATELKHLQCLEEELKPLEEVLNGAQSKNFHLRPRDLISNINVIVLELKGSETTFMCEYADETATIVEFLNRWITFAQSIISTL

SEQ ID NO: 207 - protein, 446 aa, artificial
  synthetic
DIVMTQTPLSLPVTPGEPASISCRSSKSLLHSNGITYLYWYLQKPGQSPQLLIYQMSNLVSGVPDRFSGSGSGTDFTLKISRVEAEDVGVYYCAQNLELPYTFGGGTKVEIKRTVAAPSVFIFPPSDEQLKSGTASVVCLLNNFYPREAKVQWKVDNALQSGNSQESVTEQDSKDSTYSLSSTLTLSKADYEKHKVYACEVTHQGLSSPVTKSFNRGECDKTHTCPPCPAPELLGGPSVFLFPPKPKDTLMISRTPEVTCVVVDVSHEDPEVKFNWYVDGVEVHNAKTKPREEQYSSTYRVVSVLTVLHQDWLNGKEYKCKVSNKALPAPIEKTISKAKGQPREPQVYTLPPSREEMTKNQVSLTCLVKGFYPSDIAVEWESNGQPENNYKTTPPVLDSDGSFFLYSKLTVDKSRWQQGNVFSCSVMHEALHNRFTQKSLSLSPGK

SEQ ID NO: 208 - protein, 840 aa, artificial
  synthetic
QVQLVQSGAEVKKPGSSVKVSCKASGYAFSYSWINWVRQAPGQGLEWMGRIFPGDGDTDYNGKFKGRVTITADKSTSTAYMELSSLRSEDTAVYYCARNVFDGYWLVYWGQGTLVTVSSASTKGPSVFPLAPSSKSTSGGTAALGCLVKDYFPEPVTVSWNSGALTSGVHTFPAVLQSSGLYSLSSVVTVPSSSLGTQTYICNVNHKPSNTKVDKRVEPKSCDKTHTCPPCPAPELLGGPSVFLFPPKPKDTLMISRTPEVTCVVVDVSHEDPEVKFNWYVDGVEVHNAKTKPREEQYSSTYRVVSVLTVLHQDWLNGKEYKCKVSNKALPAPIEKTISKAKGQPREPQVYTLPPSREEMTKNQVSLTCLVKGFYPSDIAVEWESNGQPENNYKTTPPVLDSDGSFFLYSKLTVDKSRWQQGNVFSCSVMHEALHNHYTQKSLSLSPGSTGSQVQLVQSGAEVKKPGSSVKVSCKASGYTFSDYVINWVRQAPGQGLEWMGEIYPGSGTNYYNEKFKAKATITADKSTSTAYMELSSLRSEDTAVYYCARRGRYGLYAMDYWGQGTTVTVSSVEGGSGGSGGSGGSGGVDDIQMTQSPSSLSASVGDRVTITCRASQDISNYLNWYQQKPGKAPKLLIYYTSRLHSGVPSRFSGSGSGTDFTFTISSLQPEDIATYFCQQGNTRPWTFGGGTKVEIKGSSSSGSSSSAPASSSTKKTQLQLEHLLLDLQMILNGINNYKNPKLTRMLTAKFAMPKKATELKHLQCLEEELKPLEEVLNGAQSKNFHLRPRDLISNINVIVLELKGSETTFMCEYADETATIVEFLNRWITFAQSIISTLT

SEQ ID NO: 209 - protein, 441 aa, artificial
  synthetic
DIQMTQSPSSLSASVGDRVTITCRASQDVNTAVAWYQQKPGKAPKLLIYSASFLYSGVPSRFSGSRSGTDFTLTISSLQPEDFATYYCQQHYTTPPTFGQGTKVEIKRTVAAPSVFIFPPSDEQLKSGTASVVCLLNNFYPREAKVQWKVDNALQSGNSQESVTEQDSKDSTYSLSSTLTLSKADYEKHKVYACEVTHQGLSSPVTKSFNRGECDKTHTCPPCPAPELLGGPSVFLFPPKPKDTLMISRTPEVTCVVVDVSHEDPEVKFNWYVDGVEVHNAKTKPREEQYNSTYRVVSVLTVLHQDWLNGKEYKCKVSNKALPAPIEKTISKAKGQPREPQVYTLPPSREEMTKNQVSLTCLVKGFYPSDIAVEWESNGQPENNYKTTPPVLDSDGSFFLYSKLTVDKSRWQQGNVFSCSVMHEALHNHYTQKSLSLSPGK

SEQ ID NO: 210 - protein, 680 aa, artificial
  synthetic
EVQLVESGGGLVQPGGSLRLSCAASGFNIKDTYIHWVRQAPGKGLEWVARIYPTNGYTRYADSVKGRFTISADTSKNTAYLQMNSLRAEDTAVYYCSRWGGDGFYAMDYWGQGTLVTVSSASTKGPSVFPLAPSSKSTSGGTAALGCLVKDYFPEPVTVSWNSGALTSGVHTFPAVLQSSGLYSLSSVVTVPSSSLGTQTYICNVNHKPSNTKVDKRVEPKSCDKTHTCPPCPAPELLGGPSVFLFPPKPKDTLMISRTPEVTCVVVDVSHEDPEVKFNWYVDGVEVHNAKTKPREEQYNSTYRVVSVLTVLHQDWLNGKEYKCKVSNKALPAPIEKTISKAKGQPREPQVYTLPPSREEMTKNQVSLTCLVKGFYPSDIAVEWESNGQPENNYKTTPPVLDSDGSFFLYSKLTVDKSRWQQGNVFSCSVMHEALHNHYTQKSLSLSPGSTGSQVQLVQSGAEVKKPGSSVKVSCKASGYTFSDYVINWVRQAPGQGLEWMGEIYPGSGTNYYNEKFKAKATITADKSTSTAYMELSSLRSEDTAVYYCARRGRYGLYAMDYWGQGTTVTVSSRTVAAPSVFIFPPSDEQLKSGTASVVCLLNNFYPREAKVQWKVDNALQSGNSQESVTEQDSKDSTYSLSSTLTLSKADYEKHKVYACEVTHQGLSSPVTKSFNRGEC

SEQ ID NO: 211 - protein, 358 aa, artificial; identical to SEQ ID NO: 177
  synthetic

SEQ ID NO: 212 - protein, 441 aa, artificial; identical to SEQ ID NO: 209
  synthetic

SEQ ID NO: 213 - protein, 681 aa, artificial
  synthetic
EVQLVESGGGLVQPGGSLRLSCAASGFNIKDTYIHWVRQAPGKGLEWVARIYPTNGYTRYADSVKGRFTISADTSKNTAYLQMNSLRAEDTAVYYCSRWGGDGFYAMDYWGQGTLVTVSSASTKGPSVFPLAPSSKSTSGGTAALGCLVKDYFPEPVTVSWNSGALTSGVHTFPAVLQSSGLYSLSSVVTVPSSSLGTQTYICNVNHKPSNTKVDKRVEPKSCDKTHTCPPCPAPELLGGPSVFLFPPKPKDTLMISRTPEVTCVVVDVSHEDPEVKFNWYVDGVEVHNAKTKPREEQYNSTYRVVSVLTVLHQDWLNGKEYKCKVSNKALPAPIEKTISKAKGQPREPQVYTLPPSREEMTKNQVSLTCLVKGFYPSDIAVEWESNGQPENNYKTTPPVLDSDGSFFLYSKLTVDKSRWQQGNVFSCSVMHEALHNHYTQKSLSLSPGSTGSQVQLVQSGAEVKKPGSSVKVSCKASGYTFSDYVINWVRQAPGQGLEWMGEIYPGSGTNYYNEKFKAKATITADKSTSTAYMELSSLRSEDTAVYYCARRGRYGLYAMDYWGQGTTVTVSSASTKGPSVFPLAPSSKSTSGGTAALGCLVKDYFPEPVTVSWNSGALTSGVHTFPAVLQSSGLYSLSSVVTVPSSSLGTQTYICNVNHKPSNTKVDKRVEPKSCDKTHS

SEQ ID NO: 214 - protein, 357 aa, artificial; identical to SEQ ID NO: 201
  synthetic

SEQ ID NO: 215 - protein, 441 aa, artificial
  synthetic
DILLTQSPVILSVSPGERVSFSCRASQSIGTNIHWYQQRTNGSPRLLIKYASESISGIPSRFSGSGSGTDFTLSINSVESEDIADYYCQQNNNWPTTFGAGTKLELKRTVAAPSVFIFPPSDEQLKSGTASVVCLLNNFYPREAKVQWKVDNALQSGNSQESVTEQDSKDSTYSLSSTLTLSKADYEKHKVYACEVTHQGLSSPVTKSFNRGECDKTHTCPPCPAPELLGGPSVFLFPPKPKDTLMISRTPEVTCVVVDVSHEDPEVKFNWYVDGVEVHNAKTKPREEQYNSTYRVVSVLTVLHQDWLNGKEYKCKVSNKALPAPIEKTISKAKGQPREPQVYTLPPSREEMTKNQVSLTCLVKGFYPSDIAVEWESNGQPENNYKTTPPVLDSDGSFFLYSKLTVDKSRWQQGNVFSCSVMHEALHNHYTQKSLSLSPGK

SEQ ID NO: 216 - protein, 679 aa, artificial
  synthetic
QVQLKQSGPGLVQPSQSLSITCTVSGFSLTNYGVHWVRQSPGKGLEWLGVIWSGGNTDYNTPFTSRLSINKDNSKSQVFFKMNSLQSNDTAIYYCARALTYYDYEFAYWGQGTLVTVSAASTKGPSVFPLAPSSKSTSGGTAALGCLVKDYFPEPVTVSWNSGALTSGVHTFPAVLQSSGLYSLSSVVTVPSSSLGTQTYICNVNHKPSNTKVDKRVEPKSCDKTHTCPPCPAPELLGGPSVFLFPPKPKDTLMISRTPEVTCVVVDVSHEDPEVKFNWYVDGVEVHNAKTKPREEQYNSTYRVVSVLTVLHQDWLNGKEYKCKVSNKALPAPIEKTISKAKGQPREPQVYTLPPSREEMTKNQVSLTCLVKGFYPSDIAVEWESNGQPENNYKTTPPVLDSDGSFFLYSKLTVDKSRWQQGNVFSCSVMHEALHNHYTQKSLSLSPGSTGSQVQLVQSGAEVKKPGSSVKVSCKASGYTFSDYVINWVRQAPGQGLEWMGEIYPGSGTNYYNEKFKAKATITADKSTSTAYMELSSLRSEDTAVYYCARRGRYGLYAMDYWGQGTTVTVSSRTVAAPSVFIFPPSDEQLKSGTASVVCLLNNFYPREAKVQWKVDNALQSGNSQESVTEQDSKDSTYSLSSTLTLSKADYEKHKVYACEVTHQGLSSPVTKSFNRGEC

SEQ ID NO: 217 - protein, 358 aa, artificial; identical to SEQ ID NO: 177
  synthetic

SEQ ID NO: 218 - protein, 441 aa, artificial; identical to SEQ ID NO: 215
  synthetic

SEQ ID NO: 219 - protein, 680 aa, artificial
  synthetic
QVQLKQSGPGLVQPSQSLSITCTVSGFSLTNYGVHWVRQSPGKGLEWLGVIWSGGNTDYNTPFTSRLSINKDNSKSQVFFKMNSLQSNDTAIYYCARALTYYDYEFAYWGQGTLVTVSAASTKGPSVFPLAPSSKSTSGGTAALGCLVKDYFPEPVTVSWNSGALTSGVHTFPAVLQSSGLYSLSSVVTVPSSSLGTQTYICNVNHKPSNTKVDKRVEPKSCDKTHTCPPCPAPELLGGPSVFLFPPKPKDTLMISRTPEVTCVVVDVSHEDPEVKFNWYVDGVEVHNAKTKPREEQYNSTYRVVSVLTVLHQDWLNGKEYKCKVSNKALPAPIEKTISKAKGQPREPQVYTLPPSREEMTKNQVSLTCLVKGFYPSDIAVEWESNGQPENNYKTTPPVLDSDGSFFLYSKLTVDKSRWQQGNVFSCSVMHEALHNHYTQKSLSLSPGSTGSQVQLVQSGAEVKKPGSSVKVSCKASGYTFSDYVINWVRQAPGQGLEWMGEIYPGSGTNYYNEKFKAKATITADKSTSTAYMELSSLRSEDTAVYYCARRGRYGLYAMDYWGQGTTVTVSSASTKGPSVFPLAPSSKSTSGGTAALGCLVKDYFPEPVTVSWNSGALTSGVHTFPAVLQSSGLYSLSSVVTVPSSSLGTQTYICNVNHKPSNTKVDKRVEPKSCDKTHS

SEQ ID NO: 220 - protein, 357 aa, artificial; identical to SEQ ID NO: 201
  synthetic

SEQ ID NO: 221 - protein, 698 aa, artificial
  synthetic
DIQLTQSPASLAVSLGQRATISCKASQSVDYDGDSYLNWYQQIPGQPPKLLIYDASNLVSGIPPRFSGSGSGTDFTLNIHPVEKVDAATYHCQQSTEDPWTFGGGTKLEIKGGGGSGGGGSGGGGSQVQLQQSGAELVRPGSSVKISCKASGYAFSSYWMNWVKQRPGQGLEWIGQIWPGDGDTNYNGKFKGKATLTADESSSTAYMQLSSLASEDSAVYFCARRETTTVGRYYYAMDYWGQGTTVTVSSGGGSSAPELLGGPSVFLFPPKPKDTLMISRTPEVTCVVVDVSHEDPEVKFNWYVDGVEVHNAKTKPREEQYNSTYRVVSVLTVLHQDWLNGKEYKCKVSNKALPAPIEKTISKAKGQPREPQVYTKPPSREEMTKNQVSLSCLVKGFYPSDIAVEWESNGQPENNYKTTVPVLDSDGSFRLASYLTVDKSRWQQGNVFSCSVMHEALHNHYTQKSLSLSPGSTGSEVQLQQSGPELVKPGASVKISCKTSGYTFTEYTMHWVKQSHGKSLEWIGGISPNIGGTSYNQKFKGKATLTVDKSSSTAYMELRSLTSEDSAVYYCARRGGSFDYWGQGTTLTVSSASTKGPSVFPLAPSSKSTSGGTAALGCLVKDYFPEPVTVSWNSGALTSGVHTFPAVLQSSGLYSLSSVVTVPSSSLGTQTYICNVNHKPSNTKVDKRVEPKSCDKTH

SEQ ID NO: 222 - protein, 214 aa, artificial
  synthetic
DIVMTQSPATLSVTPGDRVSLSCRASQSISDYLHWYQQKSHESPRLLIKYASQSISGIPSRFSGSGSGSDFTLSINSVEPEDVGVYYCQNGHSFPLTFGAGTKLELKRTVAAPSVFIFPPSDEQLKSGTASVVCLLNNFYPREAKVQWKVDNALQSGNSQESVTEQDSKDSTYSLSSTLTLSKADYEKHKVYACEVTHQGLSSPVTKSFNRGEC

SEQ ID NO: 223 - protein, 445 aa, artificial
  synthetic
DIQLTQSPASLAVSLGQRATISCKASQSVDYDGDSYLNWYQQIPGQPPKLLIYDASNLVSGIPPRFSGSGSGTDFTLNIHPVEKVDAATYHCQQSTEDPWTFGGGTKLEIKRTVAAPSVFIFPPSDEQLKSGTASVVCLLNNFYPREAKVQWKVDNALQSGNSQESVTEQDSKDSTYSLSSTLTLSKADYEKHKVYACEVTHQGLSSPVTKSFNRGECDKTHTCPPCPAPELLGGPSVFLFPPKPKDTLMISRTPEVTCVVVDVSHEDPEVKFNWYVDGVEVHNAKTKPREEQYNSTYRVVSVLTVLHQDWLNGKEYKCKVSNKALPAPIEKTISKAKGQPREPQVYTLPPSREEMTKNQVSLTCLVKGFYPSDIAVEWESNGQPENNYKTTPPVLDSDGSFFLYSKLTVDKSRWQQGNVFSCSVMHEALHNHYTQKSLSLSPGK

SEQ ID NO: 224 - protein, 680 aa, artificial
  synthetic
QVQLQQSGAELVRPGSSVKISCKASGYAFSSYWMNWVKQRPGQGLEWIGQIWPGDGDTNYNGKFKGKATLTADESSSTAYMQLSSLASEDSAVYFCARRETTTVGRYYYAMDYWGQGTTVTVSSASTKGPSVFPLAPSSKSTSGGTAALGCLVKDYFPEPVTVSWNSGALTSGVHTFPAVLQSSGLYSLSSVVTVPSSSLGTQTYICNVNHKPSNTKVDKRVEPKSCDKTHTCPPCPAPELLGGPSVFLFPPKPKDTLMISRTPEVTCVVVDVSHEDPEVKFNWYVDGVEVHNAKTKPREEQYNSTYRVVSVLTVLHQDWLNGKEYKCKVSNKALPAPIEKTISKAKGQPREPQVYTLPPSREEMTKNQVSLTCLVKGFYPSDIAVEWESNGQPENNYKTTPPVLDSDGSFFLYSKLTVDKSRWQQGNVFSCSVMHEALHNHYTQKSLSLSPGSTGSEVQLQQSGPELVKPGASVKISCKTSGYTFTEYTMHWVKQSHGKSLEWIGGISPNIGGTSYNQKFKGKATLTVDKSSSTAYMELRSLTSEDSAVYYCARRGGSFDYWGQGTTLTVSSRTVAAPSVFIFPPSDEQLKSGTASVVCLLNNFYPREAKVQWKVDNALQSGNSQESVTEQDSKDSTYSLSSTLTLSKADYEKHKVYACEVTHQGLSSPVTKSFNRGEC

SEQ ID NO: 225 - protein, 214 aa, artificial
  synthetic
DIVMTQSPATLSVTPGDRVSLSCRASQSISDYLHWYQQKSHESPRLLIKYASQSISGIPSRFSGSGSGSDFTLSINSVEPEDVGVYYCQNGHSFPLTFGAGTKLELKASTKGPSVFPLAPSSKSTSGGTAALGCLVKDYFPEPVTVSWNSGALTSGVHTFPAVLQSSGLYSLSSVVTVPSSSLGTQTYICNVNHKPSNTKVDKRVEPKSCDKTH

SEQ ID NO: 226 - protein, 445 aa, artificial
  synthetic
DIQLTQSPASLAVSLGQRATISCKASQSVDYDGDSYLNWYQQIPGQPPKLLIYDASNLVSGIPPRFSGSGSGTDFTLNIHPVEKVDAATYHCQQSTEDPWTFGGGTKLEIKRTVAAPSVFIFPPSDEQLKSGTASVVCLLNNFYPREAKVQWKVDNALQSGNSQESVTEQDSKDSTYSLSSTLTLSKADYEKHKVYACEVTHQGLSSPVTKSFNRGECDKTHTCPPCPAPELLGGPSVFLFPPKPKDTLMISRTPEVTCVVVDVSHEDPEVKFNWYVDGVEVHNAKTKPREEQYSSTYRVVSVLTVLHQDWLNGKEYKCKVSNKALPAPIEKTISKAKGQPREPQVYTLPPSREEMTKNQVSLTCLVKGFYPSDIAVEWESNGQPENNYKTTPPVLDSDGSFFLYSKLTVDKSRWQQGNVFSCSVMHEALHNHYTQKSLSLSPGK

SEQ ID NO: 227 - protein, 680 aa, artificial
  synthetic
QVQLQQSGAELVRPGSSVKISCKASGYAFSSYWMNWVKQRPGQGLEWIGQIWPGDGDTNYNGKFKGKATLTADESSSTAYMQLSSLASEDSAVYFCARRETTTVGRYYYAMDYWGQGTTVTVSSASTKGPSVFPLAPSSKSTSGGTAALGCLVKDYFPEPVTVSWNSGALTSGVHTFPAVLQSSGLYSLSSVVTVPSSSLGTQTYICNVNHKPSNTKVDKRVEPKSCDKTHTCPPCPAPELLGGPSVFLFPPKPKDTLMISRTPEVTCVVVDVSHEDPEVKFNWYVDGVEVHNAKTKPREEQYSSTYRVVSVLTVLHQDWLNGKEYKCKVSNKALPAPIEKTISKAKGQPREPQVYTLPPSREEMTKNQVSLTCLVKGFYPSDIAVEWESNGQPENNYKTTPPVLDSDGSFFLYSKLTVDKSRWQQGNVFSCSVMHEALHNHYTQKSLSLSPGSTGSEVQLQQSGPELVKPGASVKISCKTSGYTFTEYTMHWVKQSHGKSLEWIGGISPNIGGTSYNQKFKGKATLTVDKSSSTAYMELRSLTSEDSAVYYCARRGGSFDYWGQGTTLTVSSRTVAAPSVFIFPPSDEQLKSGTASVVCLLNNFYPREAKVQWKVDNALQSGNSQESVTEQDSKDSTYSLSSTLTLSKADYEKHKVYACEVTHQGLSSPVTKSFNRGEC

SEQ ID NO: 228 - protein, 214 aa, artificial; identical to SEQ ID NO: 225
  synthetic

SEQ ID NO: 229 - protein, 445 aa, artificial
  synthetic
DIQLTQSPASLAVSLGQRATISCKASQSVDYDGDSYLNWYQQIPGQPPKLLIYDASNLVSGIPPRFSGSGSGTDFTLNIHPVEKVDAATYHCQQSTEDPWTFGGGTKLEIKRTVAAPSVFIFPPSDEQLKSGTASVVCLLNNFYPREAKVQWKVDNALQSGNSQESVTEQDSKDSTYSLSSTLTLSKADYEKHKVYACEVTHQGLSSPVTKSFNRGESDKTHTCPPCPAPELLGGPSVFLFPPKPKDTLMISRTPEVTCVVVDVSHEDPEVKFNWYVDGVEVHNAKTKPREEQYSSTYRVVSVLTVLHQDWLNGKEYKCKVSNKALPAPIEKTISKAKGQPREPQVYTLPPSREEMTKNQVSLTCLVKGFYPSDIAVEWESNGQPENNYKTTPPVLDSDGSFFLYSKLTVDKSRWQQGNVFSCSVMHEALHNHYTQKSLSLSPGK

SEQ ID NO: 230 - protein, 680 aa, artificial
  synthetic
QVQLQQSGAELVRPGSSVKISCKASGYAFSSYWMNWVKQRPGQGLEWIGQIWPGDGDTNYNGKFKGKATLTADESSSTAYMQLSSLASEDSAVYFCARRETTTVGRYYYAMDYWGQGTTVTVSSASTKGPSVFPLAPSSKSTSGGTAALGCLVKDYFPEPVTVSWNSGALTSGVHTFPAVLQSSGLYSLSSVVTVPSSSLGTQTYICNVNHKPSNTKVDKRVEPKSSDKTHTCPPCPAPELLGGPSVFLFPPKPKDTLMISRTPEVTCVVVDVSHEDPEVKFNWYVDGVEVHNAKTKPREEQYSSTYRVVSVLTVLHQDWLNGKEYKCKVSNKALPAPIEKTISKAKGQPREPQVYTLPPSREEMTKNQVSLTCLVKGFYPSDIAVEWESNGQPENNYKTTPPVLDSDGSFFLYSKLTVDKSRWQQGNVFSCSVMHEALHNHYTQKSLSLSPGSTGSEVQLQQSGPELVKPGASVKISCKTSGYTFTEYTMHWVKQSHGKSLEWIGGISPNIGGTSYNQKFKGKATLTVDKSSSTAYMELRSLTSEDSAVYYCARRGGSFDYWGQGTTLTVSSRTVAAPSVFIFPPSDEQLKSGTASVVCLLNNFYPREAKVQWKVDNALQSGNSQESVTEQDSKDSTYSLSSTLTLSKADYEKHKVYACEVTHQGLSSPVTKSFNRGEC

SEQ ID NO: 231 - protein, 214 aa, artificial; identical to SEQ ID NO: 225
  synthetic

SEQ ID NO: 232 - protein, 445 aa, artificial; identical to SEQ ID NO: 223
  synthetic

SEQ ID NO: 233 - protein, 698 aa, artificial
  synthetic
QVQLQQSGAELVRPGSSVKISCKASGYAFSSYWMNWVKQRPGQGLEWIGQIWPGDGDTNYNGKFKGKATLTADESSSTAYMQLSSLASEDSAVYFCARRETTTVGRYYYAMDYWGQGTTVTVSSASTKGPSVFPLAPSSKSTSGGTAALGCLVKDYFPEPVTVSWNSGALTSGVHTFPAVLQSSGLYSLSSVVTVPSSSLGTQTYICNVNHKPSNTKVDKRVEPKSCDKTHTCPPCPAPELLGGPSVFLFPPKPKDTLMISRTPEVTCVVVDVSHEDPEVKFNWYVDGVEVHNAKTKPREEQYNSTYRVVSVLTVLHQDWLNGKEYKCKVSNKALPAPIEKTISKAKGQPREPQVYTLPPSREEMTKNQVSLTCLVKGFYPSDIAVEWESNGQPENNYKTTPPVLDSDGSFFLYSKLTVDKSRWQQGNVFSCSVMHEALHNHYTQKSLSLSPGSTGSEVQLQQSGPELVKPGASVKISCKTSGYTFTEYTMHWVKQSHGKSLEWIGGISPNIGGTSYNQKFKGKATLTVDKSSSTAYMELRSLTSEDSAVYYCARRGGSFDYWGQGTTLTVSSVEGGSGGSGGSGGSGGVDDIVMTQSPATLSVTPGDRVSLSCRASQSISDYLHWYQQKSHESPRLLIKYASQSISGIPSRFSGSGSGSDFTLSINSVEPEDVGVYYCQNGHSFPLTFGAGTKLELK

SEQ ID NO: 234 - protein, 445 aa, artificial; identical to SEQ ID NO: 226
  synthetic

SEQ ID NO: 235 - protein, 698 aa, artificial
  synthetic
QVQLQQSGAELVRPGSSVKISCKASGYAFSSYWMNWVKQRPGQGLEWIGQIWPGDGDTNYNGKFKGKATLTADESSSTAYMQLSSLASEDSAVYFCARRETTTVGRYYYAMDYWGQGTTVTVSSASTKGPSVFPLAPSSKSTSGGTAALGCLVKDYFPEPVTVSWNSGALTSGVHTFPAVLQSSGLYSLSSVVTVPSSSLGTQTYICNVNHKPSNTKVDKRVEPKSCDKTHTCPPCPAPELLGGPSVFLFPPKPKDTLMISRTPEVTCVVVDVSHEDPEVKFNWYVDGVEVHNAKTKPREEQYSSTYRVVSVLTVLHQDWLNGKEYKCKVSNKALPAPIEKTISKAKGQPREPQVYTLPPSREEMTKNQVSLTCLVKGFYPSDIAVEWESNGQPENNYKTTPPVLDSDGSFFLYSKLTVDKSRWQQGNVFSCSVMHEALHNHYTQKSLSLSPGSTGSEVQLQQSGPELVKPGASVKISCKTSGYTFTEYTMHWVKQSHGKSLEWIGGISPNIGGTSYNQKFKGKATLTVDKSSSTAYMELRSLTSEDSAVYYCARRGGSFDYWGQGTTLTVSSVEGGSGGSGGSGGSGGVDDIVMTQSPATLSVTPGDRVSLSCRASQSISDYLHWYQQKSHESPRLLIKYASQSISGIPSRFSGSGSGSDFTLSINSVEPEDVGVYYCQNGHSFPLTFGAGTKLELK

SEQ ID NO: 236 - protein, 98 aa, Homo sapiens
QVQLVQSGAEVKKPGASVKVSCKASGYTFTSYGISWVRQAPGQGLEWMGWISAYNGNTNYAQKLQGRVTMTTDTSTSTAYMELRSLRSDDTAVYYCAR

SEQ ID NO: 237 - protein, 98 aa, Homo sapiens
QVQLVQSGAEVKKPGASVKVSCKASGYTFTGYYMHWVRQAPGQGLEWMGRINPNSGGTNYAQKFQGRVTSTRDTSISTAYMELSRLRSDDTVVYYCAR

SEQ ID NO: 238 - protein, 98 aa, Homo sapiens
QVQLVQSGAEVKKPGASVKVSCKVSGYTLTELSMHWVRQAPGKGLEWMGGFDPEDGETIYAQKFQGRVTMTEDTSTDTAYMELSSLRSEDTAVYYCAT

SEQ ID NO: 239 - protein, 98 aa, Homo sapiens
QVQLVQSGAEVKKPGASVKVSCKASGYTFTSYAMHWVRQAPGQRLEWMGWINAGNGNTKYSQKFQGRVTITRDTSASTAYMELSSLRSEDTAVYYCAR

SEQ ID NO: 240 - protein, 98 aa, Homo sapiens
QMQLVQSGAEVKKTGSSVKVSCKASGYTFTYRYLHWVRQAPGQALEWMGWITPFNGNTNYAQKFQDRVTITRDRSMSTAYMELSSLRSEDTAMYYCAR

SEQ ID NO: 241 - protein, 98 aa, Homo sapiens
QVQLVQSGAEVKKPGASVKVSCKASGYTFTSYYMHWVRQAPGQGLEWMGIINPSGGSTSYAQKFQGRVTMTRDTSTSTVYMELSSLRSEDTAVYYCAR

SEQ ID NO: 242 - protein, 98 aa, Homo sapiens
QMQLVQSGPEVKKPGTSVKVSCKASGFTFTSSAVQWVRQARGQRLEWIGWIVVGSGNTNYAQKFQERVTITRDMSTSTAYMELSSLRSEDTAVYYCAA

SEQ ID NO: 243 - protein, 98 aa, Homo sapiens
QVQLVQSGAEVKKPGSSVKVSCKASGGTFSSYAISWVRQAPGQGLEWMGGIIPIFGTANYAQKFQGRVTITADESTSTAYMELSSLRSEDTAVYYCAR

SEQ ID NO: 244 - protein, 98 aa, Homo sapiens
EVQLVQSGAEVKKPGATVKISCKVSGYTFTDYYMHWVQQAPGKGLEWMGLVDPEDGETIYAEKFQGRVTITADTSTDTAYMELSSLRSEDTAVYYCAT

SEQ ID NO: 245 - protein, 98 aa, Homo sapiens; identical to SEQ ID NO: 243

SEQ ID NO: 246 - protein, 98 aa, Homo sapiens
QVQLVQSGAEVKKPGASVKVSCKASGYTFTSYDINWVRQATGQGLEWMGWMNPNSGNTGYAQKFQGRVTMTRNTSISTAYMELSSLRSEDTAVYYCAR

SEQ ID NO: 247 - protein, 100 aa, Homo sapiens
QVTLKESGPVLVKPTETLTLTCTVSGFSLSNARMGVSWIRQPPGKALEWLAHIFSNDEKSYSTSLKSRLTISKDTSKSQVVLTMTNMDPVDTATYYCARI

SEQ ID NO: 248 - protein, 100 aa, Homo sapiens
QITLKESGPTLVKPTQTLTLTCTFSGFSLSTSGVGVGWIRQPPGKALEWLALIYWNDDKRYSPSLKSRLTITKDTSKNQVVLTMTNMDPVDTATYYCAHR

SEQ ID NO: 249 - protein, 100 aa, Homo sapiens
QVTLRESGPALVKPTQTLTLTCTFSGFSLSTSGMCVSWIRQPPGKALEWLALIDWDDDKYYSTSLKTRLTISKDTSKNQVVLTMTNMDPVDTATYYCARI

SEQ ID NO: 250 - protein, 100 aa, Homo sapiens
QVTLKESGPALVKPTQTLTLTCTFSGFSLSTSGMRVSWIRQPPGKALEWLARIDWDDDKFYSTSLKTRLTISKDTSKNQVVLTMTNMDPVDTATYYCARI

SEQ ID NO: 251 - protein, 98 aa, Homo sapiens
QVQLVESGGGLVKPGGSLRLSCAASGFTFSDYYMSWIRQAPGKGLEWVSYISSSGSTIYYADSVKGRFTISRDNAKNSLYLQMNSLRAEDTAVYYCAR

SEQ ID NO: 252 - protein, 97 aa, Homo sapiens
EVQLVESGGGLVQPGGSLRLSCAASGFTFSSYDMHWVRQATGKGLEWVSAIGTAGDTYYPGSVKGRFTISRENAKNSLYLQMNSLRAGDTAVYYCAR

SEQ ID NO: 253 - protein, 100 aa, Homo sapiens
EVQLVESGGGLVKPGGSLRLSCAASGFTFSNAWMSWVRQAPGKGLEWVGRIKSKTDGGTTDYAAPVKGRFTISRDDSKNTLYLQMNSLKTEDTAVYYCTT

SEQ ID NO: 254 - protein, 98 aa, Homo sapiens
EVQLVESGGGVVRPGGSLRLSCAASGFTFDDYGMSWVRQAPGKGLEWVSGINWNGGSTGYADSVKGRFTISRDNAKNSLYLQMNSLRAEDTALYHCAR

SEQ ID NO: 255 - protein, 98 aa, Homo sapiens
EVQLVESGGGLVKPGGSLRLSCAASGFTFSSYSMNWVRQAPGKGLEWVSSISSSSSYIYYADSVKGRFTISRDNAKNSLYLQMNSLRAEDTAVYYCAR

SEQ ID NO: 256 - protein, 98 aa, Homo sapiens
EVQLLESGGGLVQPGGSLRLSCAASGFTFSSYAMSWVRQAPGKGLEWVSAISGSGGSTYYADSVKGRFTISRDNSKNTLYLQMNSLRAEDTAVYYCAK

SEQ ID NO: 257 - protein, 98 aa, Homo sapiens; identical to SEQ ID NO: 256

SEQ ID NO: 258 - protein, 98 aa, Homo sapiens
QVQLVESGGGVVQPGRSLRLSCAASGFTFSSYAMHWVRQAPGKGLEWVAVISYDGSNKYYADSVKGRFTISRDNSKNTLYLQMNSLRAEDTAVYYCAR

SEQ ID NO: 259 - protein, 98 aa, Homo sapiens; identical to SEQ ID NO: 258

SEQ ID NO: 260 - protein, 98 aa, Homo sapiens
QVQLVESGGGVVQPGRSLRLSCAASGFTFSSYGMHWVRQAPGKGLEWVAVISYDGSNKYYADSVKGRFTISRDNSKNTLYLQMNSLRAEDTAVYYCAK

SEQ ID NO: 261 - protein, 98 aa, Homo sapiens
QVQLVESGGGVVQPGRSLRLSCAASGFTFSSYGMHWVRQAPGKGLEWVAVIWYDGSNKYYADSVKGRFTISRDNSKNTLYLQMNSLRAEDTAVYYCAR

SEQ ID NO: 262 - protein, 99 aa, Homo sapiens
EVQLVESGGVVVQPGGSLRLSCAASGFTFDDYTMHWVRQAPGKGLEWVSLISWDGGSTYYADSVKGRFTISRDNSKNSLYLQMNSLRTEDTALYYCAKD

SEQ ID NO: 263 - protein, 99 aa, Homo sapiens
EVQLVESGGVVVQPGGSLRLSCAASGFTFDDYAMHWVRQAPGKGLEWVSLISWDGGSTYYADSVKGRFTISRDNSKNSLYLQMNSLRAEDTALYYCAKD

SEQ ID NO: 264 - protein, 98 aa, Homo sapiens
EVQLVESGGGLVQPGGSLRLSCAASGFTFSSYSMNWVRQAPGKGLEWVSYISSSSSTIYYADSVKGRFTISRDNAKNSLYLQMNSLRAEDTAVYYCAR

SEQ ID NO: 265 - protein, 100 aa, Homo sapiens
EVQLVESGGGLVQPGRSLRLSCTASGFTFGDYAMSWFRQAPGKGLEWVGFIRSKAYGGTTEYTASVKGRFTISRDGSKSIAYLQMNSLKTEDTAVYYCTR

SEQ ID NO: 266 - protein, 97 aa, Homo sapiens
EVQLVESGGGLIQPGGSLRLSCAASGFTVSSNYMSWVRQAPGKGLEWVSVIYSGGSTYYADSVKGRFTISRDNSKNTLYLQMNSLRAEDTAVYYCAR

SEQ ID NO: 267 - protein, 98 aa, Homo sapiens
  X (46)..(46): X may be any amino acid
EVQLVESGEGLVQPGGSLRLSCAASGFTFSSSAMHWVRQAPRKGLXWVSVISTSGDTVLYTDSVKGRFTISRDNAQNSLSLQMNSLRAEGTVVYYCVK

SEQ ID NO: 268 - protein, 98 aa, Homo sapiens
EVQLVESGGGLVQPGGSLRLSCAASGFTFSSYAMHWVRQAPGKGLEYVSAISSNGGSTYYANSVKGRFTISRDNSKNTLYLQMGSLRAEDMAVYYCAR

SEQ ID NO: 269 - protein, 98 aa, Homo sapiens
EVQLVESGGGLVQPGGSLRLSCSASGFTFSSYAMHWVRQAPGKGLEYVSAISSNGGSTYYADSVKGRFTISRDNSKNTLYLQMSSLRAEDTAVYYCVK

SEQ ID NO: 270 - protein, 97 aa, Homo sapiens
EVQLVESGGGLVQPGGSLRLSCAASGFTVSSNYMSWVRQAPGKGLEWVSVIYSGGSTYYADSVKGRFTISRDNSKNTLYLQMNSLRAEDTAVYYCAR

SEQ ID NO: 271 - protein, 98 aa, Homo sapiens
EVQLVESGGGLVQPGGSLRLSCAASGFTFSSYWMSWVRQAPGKGLEWVANIKQDGSEKYYVDSVKGRFTISRDNAKNSLYLQMNSLRAEDTAVYYCAR

SEQ ID NO: 272 - protein, 100 aa, Homo sapiens
EVQLVESGGGLVQPGGSLRLSCAASGFTFSDHYMDWVRQAPGKGLEWVGRTRNKANSYTTEYAASVKGRFTISRDDSKNSLYLQMNSLKTEDTAVYYCAR

SEQ ID NO: 273 - protein, 100 aa, Homo sapiens
EVQLVESGGGLVQPGGSLKLSCAASGFTFSGSAMHWVRQASGKGLEWVGRIRSKANSYATAYAASVKGRFTISRDDSKNTAYLQMNSLKTEDTAVYYCTR

SEQ ID NO: 274 - protein, 98 aa, Homo sapiens
EVQLVESGGGLVQPGGSLRLSCAASGFTFSSYWMHWVRQAPGKGLVWVSRINSDGSSTSYADSVKGRFTISRDNAKNTLYLQMNSLRAEDTAVYYCAR

SEQ ID NO: 275 - protein, 99 aa, Homo sapiens
EVQLVESGGGLVQPGRSLRLSCAASGFTFDDYAMHWVRQAPGKGLEWVSGISWNSGSIGYADSVKGRFTISRDNAKNSLYLQMNSLRAEDTALYYCAKD

SEQ ID NO: 276 - protein, 98 aa, Homo sapiens
QVQLVESGGGVVQPGGSLRLSCAASGFTFSSYGMHWVRQAPGKGLEWVSVIYSGGSSTYYADSVKGRFTISRDNSKNTLYLQMNSLRAEDTAVYYCAK

SEQ ID NO: 277 - protein, 98 aa, Homo sapiens
QVQLQESGPGLVKPSDTLSLTCAVSGYSISSSNWWGWIRQPPGKGLEWIGYIYYSGSTYYNPSLKSRVTMSVDTSKNQFSLKLSSVTAVDTAVYYCAR

SEQ ID NO: 278 - protein, 99 aa, Homo sapiens
QLQLQESGSGLVKPSQTLSLTCAVSGGSISSGGYSWSWIRQPPGKGLEWIGYIYHSGSTYYNPSLKSRVTISVDRSKNQFSLKLSSVTAADTAVYYCAR

SEQ ID NO: 279 - protein, 99 aa, Homo sapiens
QVQLQESGPGLVKPSQTLSLTCTVSGGSISSGDYYWSWIRQPPGKGLEWIGYIYYSGSTYYNPSLKSRVTISVDTSKNQFSLKLSSVTAADTAVYYCAR

SEQ ID NO: 280 - protein, 99 aa, Homo sapiens
QVQLQESGPGLVKPSQTLSLTCTVSGGSISSGGYYWSWIRQHPGKGLEWIGYIYYSGSTYYNPSLKSLVTISVDTSKNQFSLKLSSVTAADTAVYYCAR

SEQ ID NO: 281 - protein, 97 aa, Homo sapiens
QVQLQQWGAGLLKPSETLSLTCAVYGGSFSGYYWSWIRQPPGKGLEWIGEINHSGSTNYNPSLKSRVTISVDTSKNQFSLKLSSVTAADTAVYYCAR

SEQ ID NO: 282 - protein, 98 aa, Homo sapiens
QVQLQESGPGLVKPSETLSLTCAVSGYSISSGYYWGWIRQPPGKGLEWIGSIYHSGSTYYNPSLKSRVTISVDTSKNQFSLKLSSVTAADTAVYYCAR

SEQ ID NO: 283 - protein, 99 aa, Homo sapiens
QLQLQESGPGLVKPSETLSLTCTVSGGSISSSSYYWGWIRQPPGKGLEWIGSIYYSGSTYYNPSLKSRVTISVDTSKNQFSLKLSSVTAADTAVYYCAR

SEQ ID NO: 284 - protein, 98 aa, Homo sapiens
QVQLQESGPGLVKPPGTLSLTCAVSGGSISSSNWWSWVRQPPGKGLEWIGEIYHSGSTNYNPSLKSRVTISVDKSKNQFSLKLSSVTAADTAVYCCAR

SEQ ID NO: 285 - protein, 97 aa, Homo sapiens
QVQLQESGPGLVKPSETLSLTCTVSGGSISSYYWSWIRQPPGKGLEWIGYIYYSGSTNYNPSLKSRVTISVDTSKNQFSLKLSSVTAADTAVYYCAR

SEQ ID NO: 286 - protein, 99 aa, Homo sapiens
QVQLQESGPGLVKPSETLSLTCTVSGGSVSSGSYYWSWIRQPPGKGLEWIGYIYYSGSTNYNPSLKSRVTISVDTSKNQFSLKLSSVTAADTAVYYCAR

SEQ ID NO: 287 - protein, 98 aa, Homo sapiens
EVQLVQSGAEVKKPGESLRISCKGSGYSFTSYWISWVRQMPGKGLEWMGRIDPSDSYTNYSPSFQGHVTISADKSISTAYLQWSSLKASDTAMYYCAR

SEQ ID NO: 288 - protein, 98 aa, Homo sapiens
EVQLVQSGAEVKKPGESLKISCKGSGYSFTSYWIGWVRQMPGKGLEWMGIIYPGDSDTRYSPSFQGQVTISADKSISTAYLQWSSLKASDTAMYYCAR

SEQ ID NO: 289 - protein, 101 aa, Homo sapiens
QVQLQQSGPGLVKPSQTLSLTCAISGDSVSSNSAAWNWIRQSPSRGLEWLGRTYYRSKWYNDYAVSVKSRITINPDTSKNQFSLQLNSVTPEDTAVYYCAR

SEQ ID NO: 290 - protein, 98 aa, Homo sapiens
QVQLVQSGSELKKPGASVKVSCKASGYTFTSYAMNWVRQAPGQGLEWMGWINTNTGNPTYAQGFTGRFVFSLDTSVSTAYLQICSLKAEDTAVYYCAR

SEQ ID NO: 291 - protein, 98 aa, Homo sapiens
QVQLVQSWAEVRKSGASVKVSCSFSGFTITSYGIHWVQQSPGQGLEWMGWINPGNGSPSYAKKFQGRFTMTRDMSTTTAYTDLSSLTSEDMAVYYYAR

SEQ ID NO: 292 - protein, 98 aa, Homo sapiens
QVQLVQSGAEVKKPGASVKVSCKASGYIFTDYYMHWVRQAPGQELGWMGRINPNSGGTNYAQKFQGRVTMTRDTSISTAYTELSSLRSEDTATYYCAR

SEQ ID NO: 293 - protein, 86 aa, Homo sapiens
KPGASVKVSCKASGYTFTSYCMHWVHQVHAQGLEWMGLVCPSDGSTSYAQKFQARVTITRDTSMSTAYMELSSLRSEDTAMYYCVR

SEQ ID NO: 294 - protein, 98 aa, Homo sapiens
QVQLMQSGAEVKKPGASVRISCKASGYTFTSYCMHWVCQAHAQGLEWMGLVCPSDGSTSYAQKFQGRVTITRDTSMGTAYMELSSLRSEDTAMYYCVR

SEQ ID NO: 295 - protein, 98 aa, Homo sapiens
QVQLVQSGAEVKKPGASVKVSCKASGYTITSYCMHWVHQVHAQGLEWMGLVCPSDGSTSYAQKFQARVTITRDTSMSTAYMELSSLRSEDTAMYYCVR

SEQ ID NO: 296 - protein, 100 aa, Homo sapiens
QVTLKESGPALVKPTETLTLTCTLSGFSLSTSGMGMSWIRQPPGKALEWLAHIFLNDKKSYSTSLKNRLIISKDTSKSQVVLTMTNMDPVDTATYYCAWR

SEQ ID NO: 297 - protein, 98 aa, Homo sapiens
EVQLVESGGGLVQPGGSLRLSCAASGFTFSNSDMNWARKAPGKGLEWVSGVSWNGSRTHYVDSVKRRFIISRDNSRNSLYLQKNRRRAEDMAVYYCVR

SEQ ID NO: 298 - protein, 98 aa, Homo sapiens
  X (49)..(49): X may be any amino acid
EMQLVESGGGLQKPAWSPRLSCAASQFTFSSYYMNCVRQAPGNGLELVXQVNPNGGSTYLIDSGKDRFNTSRDNAKNTLHLQMNSLKTEDTALYYCTR

SEQ ID NO: 299 - protein, 98 aa, Homo sapiens
EVQLVESGGGLVQPGGSLRLSCAASGFTFSNSDMNWVHQAPGKGLEWVSGVSWNGSRTHYADSVKGRFIISRDNSRNTLYLQTNSLRAEDTAVYYCVR

SEQ ID NO: 300 - protein, 97 aa, Homo sapiens
EVQLVESGGGLVQPRGSLRLSCAASGFTVSSNEMSWIRQAPGKGLEWVSSISGGSTYYADSRKGRFTISRDNSKNTLYLQMNNLRAEGTAAYYCARY

SEQ ID NO: 301 - protein, 96 aa, Homo sapiens
EVQLVESRGVLVQPGGSLRLSCAASGFTVSSNEMSWVRQAPGKGLEWVSSISGGSTYYADSRKGRFTISRDNSKNTLHLQMNSLRAEDTAVYYCKK

SEQ ID NO: 302 - protein, 100 aa, Homo sapiens
EVQLVESGGGLVQPGGSLRLSCAASGFTFSDHYMSWVRQAQGKGLELVGLIRNKANSYTTEYAASVKGRLTISREDSKNTMYLQMSNLKTEDLAVYYCAR

SEQ ID NO: 303 - protein, 97 aa, Homo sapiens
EVQLVQSGGGLVHPGGSLRLSCAGSGFTFSSYAMHWVRQAPGKGLEWVSAIGTGGGTYYADSVKGRFTISRDNAKNSLYLQMNSLRAEDMAVYYCAR

SEQ ID NO: 304 - protein, 98 aa, Homo sapiens
EVQLVESGRGLAQPGGYLKLSGAASGFTVGSWYMSWIHQAPGKGLEWVSYISSSGCSTNYADSVKGRFTISTDNSKNTLYLQMNSLRVEDTAVYYCAR

SEQ ID NO: 305 - protein, 98 aa, Homo sapiens
EVQLVESGGGLVQPGGSLRLSCAASGFTFSSYWMHWVRQAPGKGLVWVSRINSDGSSTSYADSMKGQFTISRDNAKNTLYLQMNSLRAEDMAVYYCTR

SEQ ID NO: 306 - protein, 98 aa, Homo sapiens
EVQLVESGGGLVQPGGSLRLSCPDSGFTFSNHYMSWVRQAPGKGLEWISYISGDSGYTNYADSVKGRFTISRDNANNSPYLQMNSLRAEDTAVYYCVK

SEQ ID NO: 307 - protein, 97 aa, Homo sapiens
EVQLVQSGGGLVQPGGSLRLSCAGSGFTFSSYAMHWVRQAPGKGLEWVSAIGTGGGTYYADSVKGRFTISRDNAKNSLYLQMNSLRAEDMAVYYCAR

SEQ ID NO: 308 - protein, 100 aa, Homo sapiens
EVQLVESAGGLGTAWGSLRLSCAASGFTCSNAWMSWVRQAPGKGLEWVGCIKSKANGGTTDYAAPVKGRFTISRDDSKNTLYLQMISLKTEDTAVYYCTT

SEQ ID NO: 309 - protein, 98 aa, Homo sapiens
EVQLVESGGGLVQPGGSLRLSCPASGFTFSNHYMSWVRQAPGKGLEWVSYISGDSGYTNYADSVKGRFTISRDNANNSPYLQMNSLRAEDTAVYYCVK

SEQ ID NO: 310 - protein, 98 aa, Homo sapiens
EVQLVESGGGLVQPGGSLRLSCAASGFTFSNHYTSWVRQAPGKGLEWVSYSSGNSGYTNYADSVKGRFTISRDNAKNSLYLQMNSLRAEDTAVYYCVK

SEQ ID NO: 311 - protein, 98 aa, Homo sapiens
QVQLQESGPGLVKPSETLSLTCVVSGGSISSSNWWSWVRQPPGKGLEWIGEIYHSGSPNYNPSLKSRVTISVDKSKNQFSLKLSSVTAADTAVYYCAR

SEQ ID NO: 312 - protein, 98 aa, Homo sapiens
QVQLVQSGHEVKQPGASVKVSCKASGYSFTTYGMNWVPQAPGQGLEWMGWFNTYTGNPTYAQGFTGRFVFSMDTSASTAYLQISSLKAEDMAMYYCAR

SEQ ID NO: 313 - protein, 98 aa, Homo sapiens
  X (14)..(14): X can be any amion acid
EAQLTESGGDLVHXEGPLRLSCAASWFTFSIYEIHWVCQASGKGLEWVAVIWRSESHQYNADYVRGRLTTSRDNTKYMLYMQMNSLRTQNMAAFNCAG

SEQ ID NO: 314 - protein, 95 aa, Homo sapiens
DIQMTQSPSSVSASVGDRVTITCRASQGISSWLAWYQQKPGKAPKLLIYAASSLQSGVPSRFSGSGSGTDFTLTISSLQPEDFATYYCQQANSFP

SEQ ID NO: 315 - protein, 95 aa, Homo sapiens
AIQLTQSPSSLSASVGDRVTITCRASQGISSALAWYQQKPGKAPKLLIYDASSLESGVPSRFSGSGSGTDFTLTISSLQPEDFATYYCQQFNNYP

SEQ ID NO: 316 - protein, 95 aa, Homo sapiens
DIQMTQSPSSLSASVGDRVTITCRASQGISNYLAWFQQKPGKAPKSLIYAASSLQSGVPSRFSGSGSGTDFTLTISSLQPEDFATYYCQQYNSYP

SEQ ID NO: 317 - protein, 95 aa, Homo sapiens
DIQMTQSPSSLSASVGDRVTITCRASQGIRNDLGWYQQKPGKAPKRLIYAASSLQSGVPSRFSGSGSGTEFTLTISSLQPEDFATYYCLQHNSYP

SEQ ID NO: 318 - protein, 95 aa, Homo sapiens
DIQMTQSPSSLSASVGDRVTITCRASQGISNYLAWYQQKPGKVPKLLIYAASTLQSGVPSRFSGSGSGTDFTLTISSLQPEDVATYYCQKYNSAP

SEQ ID NO: 319 - protein, 95 aa, Homo sapiens
DIQMTQSPSSLSASVGDRVTITCQASQDISNYLNWYQQKPGKAPKLLIYDASNLETGVPSRFSGSGSGTDFTFTISSLQPEDIATYYCQQYDNLP

SEQ ID NO: 320 - protein, 95 aa, Homo sapiens
DIQMTQSPSSLSASVGDRVTITCRASQSISSYLNWYQQKPGKAPKLLIYAASSLQSGVPSRFSGSGSGTDFTLTISSLQPEDFATYYCQQSYSTP

SEQ ID NO: 321 - protein, 95 aa, Homo sapiens
DIQMTQSPSTLSASVGDRVTITCRASQSISSWLAWYQQKPGKAPKLLIYDASSLESGVPSRFSGSGSGTEFTLTISSLQPDDFATYYCQQYNSYS

SEQ ID NO: 322 - protein, 95 aa, Homo sapiens
AIQMTQSPSSLSASVGDRVTITCRASQGIRNDLGWYQQKPGKAPKLLIYAASSLQSGVPSRFSGSGSGTDFTLTISSLQPEDFATYYCLQDYNYP

SEQ ID NO: 323 - protein, 95 aa, Homo sapiens
AIRMTQSPSSFSASTGDRVTITCRASQGISSYLAWYQQKPGKAPKLLIYAASTLQSGVPSRFSGSGSGTDFTLTISCLQSEDFATYYCQQYYSYP

SEQ ID NO: 324 - protein, 95 aa, Homo sapiens
DIQLTQSPSFLSASVGDRVTITCRASQGISSYLAWYQQKPGKAPKLLIYAASTLQSGVPSRFSGSGSGTEFTLTISSLQPEDFATYYCQQLNSYP

SEQ ID NO: 325 - protein, 95 aa, Homo sapiens
DIQMTQSPSSLSASVGDRVTITCRASQGISNSLAWYQQKPGKAPKLLLYAASRLESGVPSRFSGSGSGTDYTLTISSLQPEDFATYYCQQYYSTP

SEQ ID NO: 326 - protein, 95 aa, Homo sapiens; identical to SEQ ID NO: 314

SEQ ID NO: 327 - protein, 95 aa, Homo sapiens; identical to SEQ ID NO: 315

SEQ ID NO: 328 - protein, 95 aa, Homo sapiens
DIQMTQSPSSLSASVGDRVTITCRASQGISSWLAWYQQKPEKAPKSLIYAASSLQSGVPSRFSGSGSGTDFTLTISSLQPEDFATYYCQQYNSYP

SEQ ID NO: 329 - protein, 95 aa, Homo sapiens
NIQMTQSPSAMSASVGDRVTITCRARQGISNYLAWFQQKPGKVPKHLIYAASSLQSGVPSRFSGSGSGTEFTLTISSLQPEDFATYYCLQHNSYP

SEQ ID NO: 330 - protein, 95 aa, Homo sapiens; identical to SEQ ID NO: 319

SEQ ID NO: 331 - protein, 95 aa, Homo sapiens; identical to SEQ ID NO: 320

SEQ ID NO: 332 - protein, 95 aa, Homo sapiens
AIRMTQSPFSLSASVGDRVTITCWASQGISSYLAWYQQKPAKAPKLFIYYASSLQSGVPSRFSGSGSGTDYTLTISSLQPEDFATYYCQQYYSTP

SEQ ID NO: 333 - protein, 95 aa, Homo sapiens
VIWMTQSPSLLSASTGDRVTISCRMSQGISSYLAWYQQKPGKAPELLIYAASTLQSGVPSRFSGSGSGTDFTLTISCLQSEDFATYYCQQYYSFP

SEQ ID NO: 334 - protein, 100 aa, Homo sapiens
DIVMTQTPLSSPVTLGQPASISCRSSQSLVHSDGNTYLSWLQQRPGQPPRLLIYKISNRFSGVPDRFSGSGAGTDFTLKISRVEAEDVGVYYCMQATQFP

SEQ ID NO: 335 - protein, 100 aa, Homo sapiens
DIVMTQSPLSLPVTPGEPASISCRSSQSLLHSNGYNYLDWYLQKPGQSPQLLIYLGSNRASGVPDRFSGSGSGTDFTLKISRVEAEDVGVYYCMQALQTP

SEQ ID NO: 336 - protein, 100 aa, Homo sapiens
  X (93)..(93): X may be any amino acid
DIVMTQTPLSLSVTPGQPASISCKSSQSLLHSDGKTYLYWYLQKPGQSPQLLIYEVSSRFSGVPDRFSGSGSGTDFTLKISRVEAEDVGVYYXMQGIHLP

SEQ ID NO: 337 - protein, 100 aa, Homo sapiens
DVVMTQSPLSLPVTLGQPASISCRSSQSLVYSDGNTYLNWFQQRPGQSPRRLIYKVSNRDSGVPDRFSGSGSGTDFTLKISRVEAEDVGVYYCMQGTHWP

SEQ ID NO: 338 - protein, 101 aa, Homo sapiens
DIVMTQTPLSLPVTPGEPASISCRSSQSLLDSDDGNTYLDWYLQKPGQSPQLLIYTLSYRASGVPDRFSGSGSGTDFTLKISRVEAEDVGVYYCMQRIEFP

SEQ ID NO: 339 - protein, 100 aa, Homo sapiens
EIVMTQTPLSLSITPGEQASISCRSSQSLLHSDGYTYLYWFLQKARPVSTLLIYEVSNRFSGVPDRFSGSGSGTDFTLKISRVEAEDFGVYYCMQDAQDP

SEQ ID NO: 340 - protein, 100 aa, Homo sapiens; identical to SEQ ID NO: 335

SEQ ID NO: 341 - protein, 100 aa, Homo sapiens
DIVMTQTPLSLSVTPGQPASISCKSSQSLLHSDGKTYLYWYLQKPGQPPQLLIYEVSNRFSGVPDRFSGSGSGTDFTLKISRVEAEDVGVYYCMQSIQLP

SEQ ID NO: 342 - protein, 100 aa, Homo sapiens
DVVMTQSPLSLPVTLGQPASISCRSSQSLVYSDGNTYLNWFQQRPGQSPRRLIYKVSNWDSGVPDRFSGSGSGTDFTLKISRVEAEDVGVYYCMQGTHWP

SEQ ID NO: 343 - protein, 101 aa, Homo sapiens; identical to SEQ ID NO: 338

SEQ ID NO: 344 - protein, 95 aa, Homo sapiens
EIVLTQSPATLSLSPGERATLSCRASQSVSSYLAWYQQKPGQAPRLLIYDASNRATGIPARFSGSGSGTDFTLTISSLEPEDFAVYYCQQRSNWP

SEQ ID NO: 345 - protein, 95 aa, Homo sapiens
EIVMTQSPATLSVSPGERATLSCRASQSVSSNLAWYQQKPGQAPRLLIYGASTRATGIPARFSGSGSGTEFTLTISSLQSEDFAVYYCQQYNNWP

SEQ ID NO: 346 - protein, 96 aa, Homo sapiens
EIVLTQSPGTLSLSPGERATLSCRASQSVSSSYLAWYQQKPGQAPRLLIYGASSRATGIPDRFSGSGSGTDFTLTISRLEPEDFAVYYCQQYGSSP

SEQ ID NO: 347 - protein, 95 aa, Homo sapiens
EIVLTQSPATLSLSPGERATLSCRASQGVSSYLAWYQQKPGQAPRLLIYDASNRATGIPARFSGSGPGTDFTLTISSLEPEDFAVYYCQQRSNWH

SEQ ID NO: 348 - protein, 95 aa, Homo sapiens; identical to SEQ ID NO: 345

SEQ ID NO: 349 - protein, 96 aa, Homo sapiens
EIVLTQSPATLSLSPGERATLSCGASQSVSSSYLAWYQQKPGLAPRLLIYDASSRATGIPDRFSGSGSGTDFTLTISRLEPEDFAVYYCQQYGSSP

SEQ ID NO: 350 - protein, 96 aa, Homo sapiens
EIVMTQSPATLSLSPGERATLSCRASQSVSSSYLSWYQQKPGQAPRLLIYGASTRATGIPARFSGSGSGTDFTLTISSLQPEDFAVYYCQQDYNLP

SEQ ID NO: 351 - protein, 101 aa, Homo sapiens
DIVMTQSPDSLAVSLGERATINCKSSQSVLYSSNNKNYLAWYQQKPGQPPKLLIYWASTRESGVPDRFSGSGSGTDFTLTISSLQAEDVAVYYCQQYYSTP

SEQ ID NO: 352 - protein, 95 aa, Homo sapiens
ETTLTQSPAFMSATPGDKVNISCKASQDIDDDMNWYQQKPGEAAIFIIQEATTLVPGIPPRFSGSGYGTDFTLTINNIESEDAAYYFCLQHDNFP

SEQ ID NO: 353 - protein, 95 aa, Homo sapiens
EIVLTQSPDFQSVTPKEKVTITCRASQSIGSSLHWYQQKPDQSPKLLIKYASQSFSGVPSRFSGSGSGTDFTLTINSLEAEDAATYYCHQSSSLP

SEQ ID NO: 354 - protein, 95 aa, Homo sapiens; identical to SEQ ID NO: 353

SEQ ID NO: 355 - protein, 95 aa, Homo sapiens
DIQLTQSPSSLSASVGDRVTITCRVSQGISSYLNWYRQKPGKVPKLLIYSASNLQSGVPSRFSGSGSGTDFTLTISSLQPEDVATYYGQRTYNAP

SEQ ID NO: 356 - protein, 95 aa, Homo sapiens
DIQMTQSPSSLSASVGDRVTITCRASQGISNNLNWYQQKPGKTPKLLIYAAPSLQSGIPSRFSDSGSGADYTLTIRSLQPEDFATYYCQQSDSTP

SEQ ID NO: 357 - protein, 95 aa, Homo sapiens
DIQVTQSPSSLSASVGDRVTITCRASQGISNGLSWYQQKPGQAPTLLIYAASSLQSGVPSRFSGSGSGTDFTLTISSLQPEDVATYYCLQDYTTP

SEQ ID NO: 358 - protein, 95 aa, Homo sapiens; identical to SEQ ID NO: 355

SEQ ID NO: 359 - protein, 95 aa, Homo sapiens
DIQMIQSPSFLSASVGDRVSIICWASEGISSNLAWYLQKPGKSPKLFLYDAKDLHPGVSSRFSGRGSGTDFTLTIISLKPEDFAAYYCKQDFSYP

SEQ ID NO: 360 - protein, 100 aa, Homo sapiens
DIVMTQTPLSSPVTLGQPASISFRSSQSLVHSDGNTYLSWLQQRPGQPPRLLIYKVSNRFSGVPDRFSGSGAGTDFTLKISRVEAEDVGVYYCTQATQFP

SEQ ID NO: 361 - protein, 96 aa, Homo sapiens
EIVMTQSPPTLSLSPGERVTLSCRASQSVSSSYLTWYQQKPGQAPRLLIYGASTRATSIPARFSGSGSGTDFTLTISSLQPEDFAVYYCQQDHNLP

SEQ ID NO: 362 - protein, 96 aa, Homo sapiens; identical to SEQ ID NO: 350

SEQ ID NO: 363 - protein, 95 aa, Homo sapiens
DVVMTQSPAFLSVTPGEKVTITCQASEGIGNYLYWYQQKPDQAPKLLIKYASQSISGVPSRFSGSGSGTDFTFTISSLEAEDAATYYCQQGNKHP

SEQ ID NO: 364 - protein, 98 aa, Homo sapiens
QSVLTQPPSVSEAPRQRVTISCSGSSSNIGNNAVNWYQQLPGKAPKLLIYYDDLLPSGVSDRFSGSKSGTSASLAISGLQSEDEADYYCAAWDDSLNG

SEQ ID NO: 365 - protein, 99 aa, Homo sapiens
QSVLTQPPSVSGAPGQRVTISCTGSSSNIGAGYDVHWYQQLPGTAPKLLIYGNSNRPSGVPDRFSGSKSGTSASLAITGLQAEDEADYYCQSYDSSLSG

SEQ ID NO: 366 - protein, 98 aa, Homo sapiens
QSVLTQPPSASGTPGQRVTISCSGSSSNIGSNTVNWYQQLPGTAPKLLIYSNNQRPSGVPDRFSGSKSGTSASLAISGLQSEDEADYYCAAWDDSLNG

SEQ ID NO: 367 - protein, 98 aa, Homo sapiens
QSVLTQPPSASGTPGQRVTISCSGSSSNIGSNYVYWYQQLPGTAPKLLIYRNNQRPSGVPDRFSGSKSGTSASLAISGLRSEDEADYYCAAWDDSLSG

SEQ ID NO: 368 - protein, 98 aa, Homo sapiens
QSVLTQPPSVSAAPGQKVTISCSGSSSNIGNNYVSWYQQLPGTAPKLLIYDNNKRPSGIPDRFSGSKSGTSATLGITGLQTGDEADYYCGTWDSSLSA

SEQ ID NO: 369 - protein, 98 aa, Homo sapiens
QAGLTQPPSVSKGLRQTATLTCTGNSNNVGNQGAAWLQQHQGHPPKLLSYRNNNRPSGISERLSASRSGNTASLTITGLQPEDEADYYCSAWDSSLSA

SEQ ID NO: 370 - protein, 99 aa, Homo sapiens
QSALTQPRSVSGSPGQSVTISCTGTSSDVGGYNYVSWYQQHPGKAPKLMIYDVSKRPSGVPDRFSGSKSGNTASLTISGLQAEDEADYYCCSYAGSYTF

SEQ ID NO: 371 - protein, 99 aa, Homo sapiens
QSALTQPASVSGSPGQSITISCTGTSSDVGGYNYVSWYQQHPGKAPKLMIYEVSNRPSGVSNRFSGSKSGNTASLTISGLQAEDEADYYCSSYTSSSTL

SEQ ID NO: 372 - protein, 99 aa, Homo sapiens
QSALTQPPSVSGSPGQSVTISCTGTSSDVGSYNRVSWYQQPPGTAPKLMIYEVSNRPSGVPDRFSGSKSGNTASLTISGLQAEDEADYYCSLYTSSSTF

SEQ ID NO: 373 - protein, 99 aa, Homo sapiens
QSALTQPASVSGSPGQSITISCTGTSSDVGSYNLVSWYQQHPGKAPKLMIYEGSKRPSGVSNRFSGSKSGNTASLTISGLQAEDEADYYCCSYAGSSTL

SEQ ID NO: 374 - protein, 99 aa, Homo sapiens
QSALTQPPSASGSPGQSVTISCTGTSSDVGGYNYVSWYQQHPGKAPKLMIYEVSKRPSGVPDRFSGSKSGNTASLTVSGLQAEDEADYYCSSYAGSNNF

SEQ ID NO: 375 - protein, 95 aa, Homo sapiens
SYELTQPPSVSVSPGQTASITCSGDKLGDKYACWYQQKPGQSPVLVIYQDSKRPSGIPERFSGSNSGNTATLTISGTQAMDEADYYCQAWDSSTA

SEQ ID NO: 376 - protein, 96 aa, Homo sapiens
SYELTQPPSVSVSPGQTARITCSGDALPKKYAYWYQQKSGQAPVLVIYEDSKRPSGIPERFSGSSSGTMATLTISGAQVEDEADYYCYSTDSSGNH

SEQ ID NO: 377 - protein, 96 aa, Homo sapiens
SYELTQPHSVSVATAQMARITCGGNNIGSKAVHWYQQKPGQDPVLVIYSDSNRPSGIPERFSGSNPGNTTTLTISRIEAGDEADYYCQVWDSSSDH

SEQ ID NO: 378 - protein, 96 aa, Homo sapiens
SYELTQPPSVSVSLGQMARITCSGEALPKKYAYWYQQKPGQFPVLVIYKDSERPSGIPERFSGSSSGTIVTLTISGVQAEDEADYYCLSADSSGTY

SEQ ID NO: 379 - protein, 96 aa, Homo sapiens
SSELTQDPAVSVALGQTVRITCQGDSLRSYYASWYQQKPGQAPVLVIYGKNNRPSGIPDRFSGSSSGNTASLTITGAQAEDEADYYCNSRDSSGNH

SEQ ID NO: 380 - protein, 96 aa, Homo sapiens
SYVLTQPPSVSVAPGKTARITCGGNNIGSKSVHWYQQKPGQAPVLVIYYDSDRPSGIPERFSGSNSGNTATLTISRVEAGDEADYYCQVWDSSSDH

SEQ ID NO: 381 - protein, 94 aa, Homo sapiens
SYELTQLPSVSVSPGQTARITCSGDVLGENYADWYQQKPGQAPELVIYEDSERYPGIPERFSGSTSGNTTTLTISRVLTEDEADYYCLSGDEDN

SEQ ID NO: 382 - protein, 96 aa, Homo sapiens
SYELMQPPSVSVSPGQTARITCSGDALPKQYAYWYQQKPGQAPVLVIYKDSERPSGIPERFSGSSSGTTVTLTISGVQAEDEADYYCQSADSSGTY

SEQ ID NO: 383 - protein, 94 aa, Homo sapiens
SYELTQPSSVSVSPGQTARITCSGDVLAKKYARWFQQKPGQAPVLVIYKDSERPSGIPERFSGSSSGTTVTLTISGAQVEDEADYYCYSAADNN

SEQ ID NO: 384 - protein, 95 aa, Homo sapiens
SYELTQPLSVSVALGQTARITCGGNNIGSKNVHWYQQKPGQAPVLVIYRDSNRPSGIPERFSGSNSGNTATLTISRAQAGDEADYYCQVWDSSTA

SEQ ID NO: 385 - protein, 103 aa, Homo sapiens
LPVLTQPPSASALLGASIKLTCTLSSEHSTYTIEWYQQRPGRSPQYIMKVKSDGSHSKGDGIPDRFMGSSSGADRYLTFSNLQSDDEAEYHCGESHTIDGQVG

SEQ ID NO: 386 - protein, 99 aa, Homo sapiens
QPVLTQSSSASASLGSSVKLTCTLSSGHSSYIIAWHQQQPGKAPRYLMKLEGSGSYNKGSGVPDRFSGSSSGADRYLTISNLQLEDEADYYCETWDSNT

SEQ ID NO: 387 - protein, 99 aa, Homo sapiens
QLVLTQSPSASASLGASVKLTCTLSSGHSSYAIAWHQQQPEKGPRYLMKLNSDGSHSKGDGIPDRFSGSSSGAERYLTISSLQSEDEADYYCQTWGTGI

SEQ ID NO: 388 - protein, 104 aa, Homo sapiens
QPVLTQPPSSSASPGESARLTCTLPSDINVGSYNIYWYQQKPGSPPRYLLYYYSDSDKGQGSGVPSRFSGSKDASANTGILLISGLQSEDEADYYCMIWPSNAS

SEQ ID NO: 389 - protein, 104 aa, Homo sapiens
QPVLTQPTSLSASPGASARFTCTLRSGINVGTYRIYWYQQKPGSLPRYLLRYKSDSDKQQGSGVPSRFSGSKDASTNAGLLLISGLQSEDEADYYCAIWYSSTS

SEQ ID NO: 390 - protein, 104 aa, Homo sapiens
QAVLTQPASLSASPGASASLTCTLRSGINVGTYRIYWYQQKPGSPPQYLLRYKSDSDKQQGSGVPSRFSGSKDASANAGILLISGLQSEDEADYYCMIWHSSAS

SEQ ID NO: 391 - protein, 105 aa, Homo sapiens
QPVLTQPSSHSASSGASVRLTCMLSSGFSVGDFWIRWYQQKPGNPPRYLLYYHSDSNKGQGSGVPSRFSGSNDASANAGILRISGLQPEDEADYYCGTWHSNSKT

SEQ ID NO: 392 - protein, 98 aa, Homo sapiens
NFMLTQPHSVSESPGKTVTISCTRSSGSIASNYVQWYQQRPGSSPTTVIYEDNQRPSGVPDRFSGSIDSSSNSASLTISGLKTEDEADYYCQSYDSSN

SEQ ID NO: 393 - protein, 98 aa, Homo sapiens
QTVVTQEPSLTVSPGGTVTLTCASSTGAVTSGYYPNWFQQKPGQAPRALIYSTSNKHSWTPARFSGSLLGGKAALTLSGVQPEDEAEYYCLLYYGGAQ

SEQ ID NO: 394 - protein, 98 aa, Homo sapiens
QAVVTQEPSLTVSPGGTVTLTCGSSTGAVTSGHYPYWFQQKPGQAPRTLIYDTSNKHSWTPARFSGSLLGGKAALTLSGAQPEDEAEYYCLLSYSGAR

SEQ ID NO: 395 - protein, 98 aa, Homo sapiens
QTVVTQEPSFSVSPGGTVTLTCGLSSGSVSTSYYPSWYQQTPGQAPRTLIYSTNTRSSGVPDRFSGSILGNKAALTITGAQADDESDYYCVLYMGSGI

SEQ ID NO: 396 - protein, 104 aa, Homo sapiens
QPVLTQPPSASASLGASVTLTCTLSSGYSNYKVDWYQQRPGKGPRFVMRVGTGGIVGSKGDGIPDRFSVLGSGLNRYLTIKNIQEEDESDYHCGADHGSGSNFV

SEQ ID NO: 397 - protein, 98 aa, Homo sapiens
QSVLTQPPSVSAAPGQKVTISCSGSSSDMGNYAVSWYQQLPGTAPKLLIYENNKRPSGIPDRFSGSKSGTSATLGITGLWPEDEADYYCLAWDTSPRA

SEQ ID NO: 398 - protein, 99 aa, Homo sapiens
QSVLTQPPSVSGAPGQRVTISCTGSSSNIGAGYVVHWYQQLPGTAPKLLIYGNSNRPSGVPDQFSGSKSGTSASLAITGLQSEDEADYYCKAWDNSLNA

SEQ ID NO: 399 - protein, 104 aa, Homo sapiens
RPVLTQPPSLSASPGATARLPCTLSSDLSVGGKNMFWYQQKPGSSPRLFLYHYSDSDKQLGPGVPSRVSGSKETSSNTAFLLISGLQPEDEADYYCQVYESSAN

SEQ ID NO: 400 - protein, 99 aa, Homo sapiens
QSALTQPPFVSGAPGQSVTISCTGTSSDVGDYDHVFWYQKRLSTTSRLLIYNVNTRPSGISDLFSGSKSGNMASLTISGLKSEVEANYHCSLYSSSYTF

SEQ ID NO: 401 - protein, 96 aa, Homo sapiens
SSGPTQVPAVSVALGQMARITCQGDSMEGSYEHWYQQKPGQAPVLVIYDSSDRPSRIPERFSGSKSGNTTTLTITGAQAEDEADYYYQLIDNHATQ

SEQ ID NO: 402 - protein, 104 aa, Homo sapiens
QPVLTQPTSLSASPGASARLTCTLRSGINLGSYRIFWYQQKPESPPRYLLSYYSDSSKHQGSGVPSRFSGSKDASSNAGILVISGLQSEDEADYYCMIWHSSAS

SEQ ID NO: 403 - protein, 98 aa, Homo sapiens
QSVVTQEPSLSGSPGGTVTLTCALSSGSVSTSHYPRWYQQTPGQAPHMLICSPNTCPSGVPGRFSGSILGNKAALTITGTQVDDDSDHYCVLYMGSGN

SEQ ID NO: 404 - protein, 133 aa, homo sapiens [sequence omitted]

SEQ ID NO: 405 - protein, 130 aa, homo sapiens
SSSTKKTQLQLEHLLLDLQMILNGINNYKNPKLTRMLTFKFYMPKKATELKHLQCLEEELKPLEEVLNLAQSKNFHLRPRDLISNINVIVLELKGSETTFMCEYADETATIVEFLNRWITFCQSIISTLT

SEQ ID NO: 406 - protein, 133 aa, artificial
  synthetic
APASSSTKKTQLQLEHLLLDLQMILNGINNYKNPKLTRMLTAKFAMPKKATELKHLQCLEEELKPLEEVLNGAQSKNFHLRPRDLISNINVIVLELKGSETTFMCEYADETATIVEFLNRWITFAQSIISTLT

SEQ ID NO: 407 - protein, 130 aa, artificial
  synthetic
SSSTKKTQLQLEHLLLDLQMILNGINNYKNPKLTAMLTKKFYMPKKATELKHLQCLEEELKPLEEVLNLAQSKNFHLRPRDLISNINVIVLELKGSETTFMCEYADETATIVEFLNRWITFCQSIISTLT

SEQ ID NO: 408 - protein, 130 aa, artificial
  synthetic
SSSTKKTQLQLEHLLLDLQMILNGINNYKNPKLTAMLAKKFYMPKKATELKHLQCLEEELKPLEEVLNLAQSKNFHLRPRDLISNINVIVLELKGSETTFMCEYADETATIVEFLNRWITFCQSIISTLT

SEQ ID NO: 409 - protein, 8 aa, artificial
  synthetic
EHALYDAL

SEQ ID NO: 410 - protein, 8 aa, artificial
  synthetic
YAFNFELI

SEQ ID NO: 411 - protein, 9 aa, artificial
  synthetic
ITILQSWIF

SEQ ID NO: 412 - protein, 22 aa, artificial
  synthetic
PKKKIQLHAEHALYDALMILNI

SEQ ID NO: 413 - protein, 22 aa, artificial
  synthetic
LEDYAFNFELILEEIARLFESG

SEQ ID NO: 414 - protein, 21 aa, artificial
  synthetic
EDEQEEMANAIITILQSWIFS

SEQ ID NO: 415 - protein, 100 aa, artificial
  synthetic
PKKKIQLHAEHALYDALMILNIVKTNSPPAEEKLEDYAFNFELILEEIARLFESGDQKDEAEKAKRMKEWMKRIKTTASEDEQEEMANAIITILQSWIFS

SEQ ID NO: 416 - protein, 115 aa, artificial
  synthetic
GSSSSGSSSSGSSSSPKKKIQLHAEHALYDALMILNIVKTNSPPAEEKLEDYAFNFELILEEIARLFESGDQKDEAEKAKRMKEWMKRIKTTASEDEQEEMANAIITILQSWIFS

SEQ ID NO: 417 - protein, 302 aa, artificial
  synthetic
SKNFHLRPRDLISNINVIVLELKGSETTFMCEYADETATIVEFLNRWITFSQSIISTLTGGSSSTKKTQLQLEHLLLDLQMILNGINNYKNPKLTRMLTFKFYMPKKATELKHLQCLEEELKPLEEVLNLAQGSGGGSELCDDDPPEIPHATFKAMAYKEGTMLNCECKRGFRRIKSGSLYMLCTGNSSHSSWDNQCQCTSSATRNTTKQVTPQPEEQKERKTTEMQSPMQPVDQASLPGHCREPPPWENEATERIYHFWGQMVYYQCVQGYRALHRGPAESVCKMTHGKTRWTQPQLICTG

SEQ ID NO: 418 - protein, 114 aa, homo sapiens
NWVNVISDLKKIEDLIQSMHIDATLYTESDVHPSCKVTAMKCFLLELQVISLESGDASIHDTVENLIILANNSLSSNGNVTESGCKECEELEEKNIKEFLQSFVHIVQMFINTS

SEQ ID NO: 419 - protein, 65 aa, homo sapiens
ITCPPPMSVEHADIWVKSYSLYSRERYICNSGFKRKAGTSSLTECVLNKATNVAHWTTPSLKCIR

SEQ ID NO: 420 - protein, 138 aa, homo sapiens
HKSSSQGQDRHMIRMRQLIDIVDQLKNYVNDLVPEFLPAPEDVETNCEWSAFSCFQKAQLKSANTGNNERIINVSIKKLKRKPPSTNAGRRQKHRLTCPSCDSYEKKPPKEFLERFKSLLQKMIHQHLSSRTHGSEDS

SEQ ID NO: 421 - protein, 133 aa, artificial
  synthetic
  X (5)..(5): X may be any amino acid
  X (8)..(9): X may be any amino acid
  X (11)..(16): X may be any amino acid
  X (19)..(19): X may be any amino acid
  X (23)..(23): X may be any amino acid
  X (65)..(66): X may be any amino acid
  X (68)..(73): X may be any amino acid
  X (75)..(80): X may be any amino acid
  X (109)..(110): X may be any amino acid
  X (112)..(113): X may be any amino acid
  X (116)..(117): X may be any amino acid
  X (119)..(120): X may be any amino acid
  X (123)..(123): X may be any amino acid
QGQDXHMXXMXXXXXXVDXLKNXVNDLVPEFLPAPEDVETNCEWSAFSCFQKAQLKSANTGNNEXXIXXXXXXLXXXXXXTNAGRRQKHRLTCPSCDSYEKKPPKEFLXXFXXLLXXMXXQHXSSRTHGSEDS

SEQ ID NO: 422 - protein, 157 aa, homo sapiens
YFGKLESKLSVIRNLNDQVLFIDQGNRPLFEDMTDSDCRDNAPRTIFIISMYKDSQPRGMAVTISVKCEKISTLSCENKIISFKEMNPPDNIKDTKSDIIFFQRSVPGHDNKMQFESSSYEGYFLACEKERDLFKLILKKEDELGDRSIMFTVQNED

SEQ ID NO: 423 - protein, 165 aa, homo sapiens [sequence omitted]

SEQ ID NO: 424 - protein, 166 aa, homo sapiens
CDLPETHSLDNRRTLMLLAQMSRISPSSCLMDRHDFGFPQEEFDGNQFQKAPAISVLHELIQQIFNLFTTKDSSAAWDEDLLDKFCTELYQQLNDLEACVMQEERVGETPLMNADSILAVKKYFRRITLYLTEKKYSPCAWEVVRAEIMRSLSLSTNLQERLRRKE

SEQ ID NO: 425 - protein, 166 aa, homo sapiens
CDLPQTHSLGNRRALILLAQMGRISHFSCLKDRHDFGFPEEEFDGHQFQKTQAISVLHEMIQQTFNLFSTEDSSAAWEQSLLEKFSTELYQQLNDLEACVIQEVGVEETPLMNEDSILAVRKYFQRITLYLTEKKYSPCAWEVVRAEIMRSLSFSTNLQKRLRRKD

SEQ ID NO: 426 - protein, 166 aa, homo sapiens
CDLPQTHSLSNRRTLMIMAQMGRISPFSCLKDRHDFGFPQEEFDGNQFQKAQAISVLHEMIQQTFNLFSTKDSSATWDETLLDKFYTELYQQLNDLEACMMQEVGVEDTPLMNVDSILTVRKYFQRITLYLTEKKYSPCAWEVVRAEIMRSFSLSANLQERLRRKE

SEQ ID NO: 427 - protein, 166 aa, homo sapiens
CDLPQTHSLGHRRTMMLLAQMRRISLFSCLKDRHDFRFPQEEFDGNQFQKAEAISVLHEVIQQTFNLFSTKDSSVAWDERLLDKLYTELYQQLNDLEACVMQEVWVGGTPLMNEDSILAVRKYFQRITLYLTEKKYSPCAWEVVRAEIMRSFSSSRNLQERLRRKE

SEQ ID NO: 428 - protein, 166 aa, homo sapiens
CDLPQTHSLRNRRALILLAQMGRISPFSCLKDRHEFRFPEEEFDGHQFQKTQAISVLHEMIQQTFNLFSTEDSSAAWEQSLLEKFSTELYQQLNDLEACVIQEVGVEETPLMNEDFILAVRKYFQRITLYLMEKKYSPCAWEVVRAEIMRSFSFSTNLKKGLRRKD

SEQ ID NO: 429 - protein, 166 aa, homo sapiens
CDLPQTHSLGNRRALILLAQMRRISPFSCLKDRHDFEFPQEEFDDKQFQKAQAISVLHEMIQQTFNLFSTKDSSAALDETLLDEFYIELDQQLNDLESCVMQEVGVIESPLMYEDSILAVRKYFQRITLYLTEKKYSSCAWEVVRAEIMRSFSLSINLQKRLKSKE

SEQ ID NO: 430 - protein, 166 aa, homo sapiens
CDLPQTHSLGNRRALILLGQMGRISPFSCLKDRHDFRIPQEEFDGNQFQKAQAISVLHEMIQQTFNLFSTEDSSAAWEQSLLEKFSTELYQQLNDLEACVIQEVGVEETPLMNEDSILAVRKYFQRITLYLIERKYSPCAWEVVRAEIMRSLSFSTNLQKRLRRKD

SEQ ID NO: 431 - protein, 166 aa, homo sapiens
CNLSQTHSLNNRRTLMLMAQMRRISPFSCLKDRHDFEFPQEEFDGNQFQKAQAISVLHEMMQQTFNLFSTKNSSAAWDETLLEKFYIELFQQMNDLEACVIQEVGVEETPLMNEDSILAVKKYFQRITLYLMEKKYSPCAWEVVRAEIMRSLSFSTNLQKRLRRKD

SEQ ID NO: 432 - protein, 166 aa, homo sapiens
CDLPQTHSLGNRRALILLAQMGRISHFSCLKDRYDFGFPQEVFDGNQFQKAQAISAFHEMIQQTFNLFSTKDSSAAWDETLLDKFYIELFQQLNDLEACVTQEVGVEEIALMNEDSILAVRKYFQRITLYLMGKKYSPCAWEVVRAEIMRSFSFSTNLQKGLRRKD

SEQ ID NO: 433 - protein, 166 aa, homo sapiens
CDLPQTHSLGNRRALILLAQMGRISPFSCLKDRHDFGLPQEEFDGNQFQKTQAISVLHEMIQQTFNLFSTEDSSAAWEQSLLEKFSTELYQQLNNLEACVIQEVGMEETPLMNEDSILAVRKYFQRITLYLTEKKYSPCAWEVVRAEIMRSLSFSTNLQKILRRKD

SEQ ID NO: 434 - protein, 166 aa, homo sapiens
MSYNLLGFLQRSSNFQCQKLLWQLNGRLEYCLKDRMNFDIPEEIKQLQQFQKEDAALTIYEMLQNIFAIFRQDSSSTGWNETIVENLLANVYHQINHLKTVLEEKLEKEDFTRGKLMSSLHLKRYYGRILHYLKAKEYSHCAWTIVRVEILRNFYFINRLTGYLRN

SEQ ID NO: 435 - protein, 152 aa, homo sapiens
DCDIEGKDGKQYESVLMVSIDQLLDSMKEIGSNCLNNEFNFFKRHICDANKEGMFLFRAARKLRQFLKMNSTGDFDLHLLKVSEGTTILLNCTGQVKGRKPAALGEAQPTKSLEENKSLKEQKKLNDLCFLKRLLQEIKTCWNKILMGTKEH

SEQ ID NO: 436 - protein, 215 aa, homo sapiens
FPRPPGRPQLSLQELRREFTVSLHLARKLLSEVRGQAHRFAESHLPGVNLYLLPLGEQLPDVSLTFQAWRRLSDPERLCFISTTLQPFHALLGGLGTQGRWTNMERMQLWAMRLDLRDLQRHLRFQVLAAGFNLPEEEEEEEEEEEEERKGLLPGALGSALQGPAQVSWPQLLSTYRLLHSLELVLSRAVRELLLLSKAGHSVWPLGFPTLSPQP

SEQ ID NO: 437 - protein, 209 aa, homo sapiens
RKGPPAALTLPRVQCRASRYPIAVDCSWTLPPAPNSTSPVSFIATYRLGMAARGHSWPCLQQTPTSTSCTITDVQLFSMAPYVLNVTAVHPWGSSSSFVPFITEHIIKPDPPEGVRLSPLAERQLQVQWEPPGSWPFPEIFSLKYWIRYKRQGAARFHRVGPIEATSFILRAVRPRARYYVQVAAQDLTDYGELSDWSLPATATMSLGK

SEQ ID NO: 438 - protein, 197 aa, homo sapiens
RNLPVATPDPGMFPCLHHSQNLLRAVSNMLQKARQTLEFYPCTSEEIDHEDITKDKTSTVEACLPLELTKNESCLNSRETSFITNGSCLASRKTSFMMALCLSSIYEDLKMYQVEFKTMNAKLLMDPKRQIFLDQNMLAVIDELMQALNFNSETVPQKSSLEEPDFYKTKIKLCILLHAFRIRAVTIDRVMSYLNAS

SEQ ID NO: 439 - protein, 306 aa, homo sapiens
IWELKKDVYVVELDWYPDAPGEMVVLTCDTPEEDGITWTLDQSSEVLGSGKTLTIQVKEFGDAGQYTCHKGGEVLSHSLLLLHKKEDGIWSTDILKDQKEPKNKTFLRCEAKNYSGRFTCWWLTTISTDLTFSVKSSRGSSDPQGVTCGAATLSAERVRGDNKEYEYSVECQEDSACPAAEESLPIEVMVDAVHKLKYENYTSSFFIRDIIKPDPPKNLQLKPLKNSRQVEVSWEYPDTWSTPHSYFSLTFCVQVQGKSKREKKDRVFTDKTSATVICRKNASISVRAQDRYYSSSWSEWASVPCS

SEQ ID NO: 440 - protein, 10 aa, homo sapiens
EPKSCDKTHS

SEQ ID NO: 441 - protein, 446 aa, artificial; identical to SEQ ID NO: 175
  syntetic

SEQ ID NO: 442 - protein, 679 aa, Artificial; identical to SEQ ID NO: 176
  synthetic

SEQ ID NO: 443 - protein, 344 aa, Artificial
  synthetic
DIQMTQSPSSLSASVGDRVTITCRASQDISNYLNWYQQKPGKAPKLLIYYTSRLHSGVPSRFSGSGSGTDFTFTISSLQPEDIATYFCQQGNTRPWTFGGGTKVEIKASTKGPSVFPLAPSSKSTSGGTAALGCLVKDYFPEPVTVSWNSGALTSGVHTFPAVLQSSGLYSLSSVVTVPSSSLGTQTYICNVNHKPSNTKVDKRVEPKSCDKTHSGGGGSGGGGSGGGGSNWVNVISDLKKIEDLIQSMHIDATLYTESDVHPSCKVTAMKCFLLELQVISLESGDASIHDTVENLIILANNSLSSNGNVTESGCKECEELEEKNIKEFLQSFVHIVQMFINTS

SEQ ID NO: 444 - protein, 446 aa, artificial; identical to SEQ ID NO: 175
  synthetic

SEQ ID NO: 445 - protein, 679 aa, artificial; identical to SEQ ID NO: 176
  synthetic

SEQ ID NO: 446 - protein, 387 aa, artificial
  synthetic
DIQMTQSPSSLSASVGDRVTITCRASQDISNYLNWYQQKPGKAPKLLIYYTSRLHSGVPSRFSGSGSGTDFTFTISSLQPEDIATYFCQQGNTRPWTFGGGTKVEIKASTKGPSVFPLAPSSKSTSGGTAALGCLVKDYFPEPVTVSWNSGALTSGVHTFPAVLQSSGLYSLSSVVTVPSSSLGTQTYICNVNHKPSNTKVDKRVEPKSCDKTHSGGSGGGGSGGGGSGGYFGKLESKLSVIRNLNDQVLFIDQGNRPLFEDMTDSDCRDNAPRTIFIISKYGDSGARGLAVTISVKCEKISTLSCENKIISFKEMNPPDNIKDTKSDIIFFERDVPGHSGKVQFESSSYEGYFLACEKERDLFKLILKKEDELGDRSIMFTVQNED

SEQ ID NO: 447 - protein, 446 aa, artificial; identical to SEQ ID NO: 175
  synthetic

SEQ ID NO: 448 - protein, 679 aa, artificial; identical to SEQ ID NO: 176
  synthetic

SEQ ID NO: 449 - protein, 394 aa, artificial
  synthetic
DIQMTQSPSSLSASVGDRVTITCRASQDISNYLNWYQQKPGKAPKLLIYYTSRLHSGVPSRFSGSGSGTDFTFTISSLQPEDIATYFCQQGNTRPWTFGGGTKVEIKASTKGPSVFPLAPSSKSTSGGTAALGCLVKDYFPEPVTVSWNSGALTSGVHTFPAVLQSSGLYSLSSVVTVPSSSLGTQTYICNVNHKPSNTKVDKRVEPKSCDKTHSGGGGSGGGGSGGGGSDLPQTHSLGSRRTLMLLAQMRRISLFSCAKDRHDFGFPQEEFGNQFQKAETIPVLHEMIQQIFNLFSTKDSSAAWDETLLDKFYTELYQQLNDLEACVIQGVGVTETPLMKEDSILAVRKYFQRITLYLKEKKYSPCAWEVVRAEIMRSFSLSTNLQESLRSKE

SEQ ID NO: 450 - protein, 441 aa, artificial
  synthetic
EIVLTQSPATLSLSPGERATLSCRASQSVRSYLAWYQQKPGQAPRLLFSDASNRATGIPARFSGSGSGTDFTLTISSLEPEDFAVYYCQQYRYSPRTFGQGTKVEIKRTVAAPSVFIFPPSDEQLKSGTASVVCLLNNFYPREAKVQWKVDNALQSGNSQESVTEQDSKDSTYSLSSTLTLSKADYEKHKVYACEVTHQGLSSPVTKSFNRGECDKTHTCPPCPAPELLGGPSVFLFPPKPKDTLMISRTPEVTCVVVDVSHEDPEVKFNWYVDGVEVHNAKTKPREEQYSSTYRVVSVLTVLHQDWLNGKEYKCKVSNKALPAPIEKTISKAKGQPREPQVYTLPPSREEMTKNQVSLTCLVKGFYPSDIAVEWESNGQPENNYKTTPPVLDSDGSFFLYSKLTVDKSRWQQGNVFSCSVMHEALHNHYTQKSLSLSPGK

SEQ ID NO: 451 - protein, 676 aa, Artificial
  synthetic
EVQLVESGGGLVQPGRSLRLSCAASGFTFDNYAMHWVRQAPGKGLEWVSGISRSSGDIDYADSVKGRFTISRDNAKNSLYLQMNSLRAEDTALYYCARGGVGSFDTWGQGTMVTVSSASTKGPSVFPLAPSSKSTSGGTAALGCLVKDYFPEPVTVSWNSGALTSGVHTFPAVLQSSGLYSLSSVVTVPSSSLGTQTYICNVNHKPSNTKVDKRVEPKSCDKTHTCPPCPAPELLGGPSVFLFPPKPKDTLMISRTPEVTCVVVDVSHEDPEVKFNWYVDGVEVHNAKTKPREEQYSSTYRVVSVLTVLHQDWLNGKEYKCKVSNKALPAPIEKTISKAKGQPREPQVYTLPPSREEMTKNQVSLTCLVKGFYPSDIAVEWESNGQPENNYKTTPPVLDSDGSFFLYSKLTVDKSRWQQGNVFSCSVMHEALHNHYTQKSLSLSPGSTGSEVQLVQSGAEVKKSGESLKISCKGSGYSFTSYWIGWVRQMPGKGLEWMGIFYPGDSSTRYSPSFQGQVTISADKSVNTAYLQWSSLKASDTAMYYCARRRNWGNAFDIWGQGTMVTVSSRTVAAPSVFIFPPSDEQLKSGTASVVCLLNNFYPREAKVQWKVDNALQSGNSQESVTEQDSKDSTYSLSSTLTLSKADYEKHKVYACEVTHQGLSSPVTKSFNRGEC

SEQ ID NO: 452 - protein, 359 aa, Artificial
  Synthetic
EIVLTQSPGTLSLSPGERATLSCRASQSVSSSYLAWYQQKPGQAPRLLIYGASSRATGIPDRFSGSGSGTDFTLTISRLEPEDFAVYYCQQYGSSTWTFGQGTKVEIKASTKGPSVFPLAPSSKSTSGGTAALGCLVKDYFPEPVTVSWNSGALTSGVHTFPAVLQSSGLYSLSSVVTVPSSSLGTQTYICNVNHKPSNTKVDKRVEPKSCDKTHSGSSSSGSSSSAPASSSTKKTQLQLEHLLLDLQMILNGINNYKNPKLTRMLTAKFAMPKKATELKHLQCLEEELKPLEEVLNGAQSKNFHLRPRDLISNINVIVLELKGSETTFMCEYADETATIVEFLNRWITFAQSIISTLT

SEQ ID NO: 453 - protein, 441 aa, artificial; identical to SEQ ID NO: 450
  synthetic

SEQ ID NO: 454 - protein, 676 aa, Artificial; identical to SEQ ID NO: 451
  synthetic

SEQ ID NO: 455 - protein, 358 aa, Artificial
  Synthetic
EIVLTQSPGTLSLSPGERATLSCRASQSVSSSYLAWYQQKPGQAPRLLIYGASSRATGIPDRFSGSGSGTDFTLTISRLEPEDFAVYYCQQYGSSTWTFGQGTKVEIKASTKGPSVFPLAPSSKSTSGGTAALGCLVKDYFPEPVTVSWNSGALTSGVHTFPAVLQSSGLYSLSSVVTVPSSSLGTQTYICNVNHKPSNTKVDKRVEPKSCDKTHSGSSSSGSSSSGSSSSTKKTQLQLEHLLLDLQMILNGINNYKNPKLTRMLTFKFYMPKKATELKHLQCLEEELKPLEEVLNLAQSKNFHLRPRDLISNINVIVLELKGSETTFMCEYADETATIVEFLNRWITFCQSIISTLT

SEQ ID NO: 456 - protein, 446 aa, artificial; identical to SEQ ID NO: 184
  synthetic

SEQ ID NO: 457 - protein, 678 aa, Artificial
  synthetic
QVQLVQSGAEVKKPGSSVKVSCKASGYAFSYSWINWVRQAPGQGLEWMGRIFPGDGDTDYNGKFKGRVTITADKSTSTAYMELSSLRSEDTAVYYCARNVFDGYWLVYWGQGTLVTVSSASTKGPSVFPLAPSSKSTSGGTAALGCLVKDYFPEPVTVSWNSGALTSGVHTFPAVLQSSGLYSLSSVVTVPSSSLGTQTYICNVNHKPSNTKVDKRVEPKSCDKTHTCPPCPAPELLGGPSVFLFPPKPKDTLMISRTPEVTCVVVDVSHEDPEVKFNWYVDGVEVHNAKTKPREEQYSSTYRVVSVLTVLHQDWLNGKEYKCKVSNKALPAPIEKTISKAKGQPREPQVYTLPPSREEMTKNQVSLTCLVKGFYPSDIAVEWESNGQPENNYKTTPPVLDSDGSFFLYSKLTVDKSRWQQGNVFSCSVMHEALHNHYTQKSLSLSPGSTGSEVQLVQSGAEVKKSGESLKISCKGSGYSFTSYWIGWVRQMPGKGLEWMGIFYPGDSSTRYSPSFQGQVTISADKSVNTAYLQWSSLKASDTAMYYCARRRNWGNAFDIWGQGTMVTVSSRTVAAPSVFIFPPSDEQLKSGTASVVCLLNNFYPREAKVQWKVDNALQSGNSQESVTEQDSKDSTYSLSSTLTLSKADYEKHKVYACEVTHQGLSSPVTKSFNRGEC

SEQ ID NO: 458 - protein, 359 aa, Artificial; identical to SEQ ID NO: 452
  Synthetic

SEQ ID NO: 459 - protein, 446 aa, Artificial; identical to SEQ ID NO: 175
  Synthetic

SEQ ID NO: 460 - protein, 678 aa, Artificial
  Synthetic
QVQLVQSGAEVKKPGSSVKVSCKASGYAFSYSWINWVRQAPGQGLEWMGRIFPGDGDTDYNGKFKGRVTITADKSTSTAYMELSSLRSEDTAVYYCARNVFDGYWLVYWGQGTLVTVSSASTKGPSVFPLAPSSKSTSGGTAALGCLVKDYFPEPVTVSWNSGALTSGVHTFPAVLQSSGLYSLSSVVTVPSSSLGTQTYICNVNHKPSNTKVDKRVEPKSCDKTHTCPPCPAPELLGGPSVFLFPPKPKDTLMISRTPEVTCVVVDVSHEDPEVKFNWYVDGVEVHNAKTKPREEQYNSTYRVVSVLTVLHQDWLNGKEYKCKVSNKALPAPIEKTISKAKGQPREPQVYTLPPSREEMTKNQVSLTCLVKGFYPSDIAVEWESNGQPENNYKTTPPVLDSDGSFFLYSKLTVDKSRWQQGNVFSCSVMHEALHNHYTQKSLSLSPGSTGSEVQLVQSGAEVKKSGESLKISCKGSGYSFTSYWIGWVRQMPGKGLEWMGIFYPGDSSTRYSPSFQGQVTISADKSVNTAYLQWSSLKASDTAMYYCARRRNWGNAFDIWGQGTMVTVSSRTVAAPSVFIFPPSDEQLKSGTASVVCLLNNFYPREAKVQWKVDNALQSGNSQESVTEQDSKDSTYSLSSTLTLSKADYEKHKVYACEVTHQGLSSPVTKSFNRGEC

SEQ ID NO: 461 - protein, 359 aa, Artificial; identical to SEQ ID NO: 452
  Synthetic

SEQ ID NO: 462 - protein, 446 aa, Artificial; identical to SEQ ID NO: 184
  Synthetic

SEQ ID NO: 463 - protein, 679 aa, Artificial; identical to SEQ ID NO: 185
  Synthetic

SEQ ID NO: 464 - protein, 358 aa, Artificial; identical to SEQ ID NO: 177
  Synthetic

SEQ ID NO: 465 - protein, 446 aa, Artificial; identical to SEQ ID NO: 175
  Synthetic

SEQ ID NO: 466 - protein, 679 aa, Artificial; identical to SEQ ID NO: 176
  Synthetic

SEQ ID NO: 467 - protein, 215 aa, Artificial
  Synthetic
DIQMTQSPSSLSASVGDRVTITCRASQDISNYLNWYQQKPGKAPKLLIYYTSRLHSGVPSRFSGSGSGTDFTFTISSLQPEDIATYFCQQGNTRPWTFGGGTKVEIKASTKGPSVFPLAPSSKSTSGGTAALGCLVKDYFPEPVTVSWNSGALTSGVHTFPAVLQSSGLYSLSSVVTVPSSSLGTQTYICNVNHKPSNTKVDKRVEPKSCDKTHS

SEQ ID NO: 468 - protein, 446 aa, Artificial; identical to SEQ ID NO: 175
  Synthetic

SEQ ID NO: 469 - protein, 680 aa, Artificial; identical to SEQ ID NO: 200
  Synthetic

SEQ ID NO: 470 - protein, 214 aa, Artificial
  Synthetic
DIQMTQSPSSLSASVGDRVTITCRASQDISNYLNWYQQKPGKAPKLLIYYTSRLHSGVPSRFSGSGSGTDFTFTISSLQPEDIATYFCQQGNTRPWTFGGGTKVEIKRTVAAPSVFIFPPSDEQLKSGTASVVCLLNNFYPREAKVQWKVDNALQSGNSQESVTEQDSKDSTYSLSSTLTLSKADYEKHKVYACEVTHQGLSSPVTKSFNRGEC

SEQ ID NO: 471 - protein, 441 aa, Artificial
  Synthetic
EIVLTQSPATLSLSPGERATLSCRASQSVRSYLAWYQQKPGQAPRLLFSDASNRATGIPARFSGSGSGTDFTLTISSLEPEDFAVYYCQQYRYSPRTFGQGTKVEIKRTVAAPSVFIFPPSDEQLKSGTASVVCLLNNFYPREAKVQWKVDNALQSGNSQESVTEQDSKDSTYSLSSTLTLSKADYEKHKVYACEVTHQGLSSPVTKSFNRGECDKTHTCPPCPAPELLGGPSVFLFPPKPKDTLMISRTPEVTCVVVDVSHEDPEVKFNWYVDGVEVHNAKTKPREEQYNSTYRVVSVLTVLHQDWLNGKEYKCKVSNKALPAPIEKTISKAKGQPREPQVYTLPPSREEMTKNQVSLTCLVKGFYPSDIAVEWESNGQPENNYKTTPPVLDSDGSFFLYSKLTVDKSRWQQGNVFSCSVMHEALHNHYTQKSLSLSPGK

SEQ ID NO: 472 - protein, 677 aa, Artificial
  Synthetic
EVQLVESGGGLVQPGRSLRLSCAASGFTFDNYAMHWVRQAPGKGLEWVSGISRSSGDIDYADSVKGRFTISRDNAKNSLYLQMNSLRAEDTALYYCARGGVGSFDTWGQGTMVTVSSASTKGPSVFPLAPSSKSTSGGTAALGCLVKDYFPEPVTVSWNSGALTSGVHTFPAVLQSSGLYSLSSVVTVPSSSLGTQTYICNVNHKPSNTKVDKRVEPKSCDKTHTCPPCPAPELLGGPSVFLFPPKPKDTLMISRTPEVTCVVVDVSHEDPEVKFNWYVDGVEVHNAKTKPREEQYNSTYRVVSVLTVLHQDWLNGKEYKCKVSNKALPAPIEKTISKAKGQPREPQVYTLPPSREEMTKNQVSLTCLVKGFYPSDIAVEWESNGQPENNYKTTPPVLDSDGSFFLYSKLTVDKSRWQQGNVFSCSVMHEALHNHYTQKSLSLSPGSTGSQVQLVQSGAEVKKPGSSVKVSCKASGYTFSDYVINWVRQAPGQGLEWMGEIYPGSGTNYYNEKFKAKATITADKSTSTAYMELSSLRSEDTAVYYCARRGRYGLYAMDYWGQGTTVTVSSRTVAAPSVFIFPPSDEQLKSGTASVVCLLNNFYPREAKVQWKVDNALQSGNSQESVTEQDSKDSTYSLSSTLTLSKADYEKHKVYACEVTHQGLSSPVTKSFNRGEC

SEQ ID NO: 473 - protein, 358 aa, Artificial; identical to SEQ ID NO: 177
  Synthetic

SEQ ID NO: 474 - protein, 446 aa, Artificial; identical to SEQ ID NO: 175
  Synthetic

SEQ ID NO: 475 - protein, 678 aa, Artificial; identical to SEQ ID NO: 460
  Synthetic

SEQ ID NO: 476 - protein, 358 aa, Artificial
  Synthetic
EIVLTQSPGTLSLSPGERATLSCRASQSVSSSYLAWYQQKPGQAPRLLIYGASSRATGIPDRFSGSGSGTDFTLTISRLEPEDFAVYYCQQYGSSTWTFGQGTKVEIKASTKGPSVFPLAPSSKSTSGGTAALGCLVKDYFPEPVTVSWNSGALTSGVHTFPAVLQSSGLYSLSSVVTVPSSSLGTQTYICNVNHKPSNTKVDKRVEPKSCDKTHSGSSSSGSSSSGSSSSTKKTQLQLEHLLLDLQMILNGINNYKNPKLTAMLAKKFYMPKKATELKHLQCLEEELKPLEEVLNLAQSKNFHLRPRDLISNINVIVLELKGSETTFMCEYADETATIVEFLNRWITFCQSIISTLT

SEQ ID NO: 477 - protein, 446 aa, Artificial; identical to SEQ ID NO: 205
  Synthetic

SEQ ID NO: 478 - protein, 679 aa, Artificial; identical to SEQ ID NO: 176
  Synthetic

SEQ ID NO: 479 - protein, 344 aa, Artificial; identical to SEQ ID NO: 443
  Synthetic

SEQ ID NO: 480 - protein, 446 aa, Artificial
  Synthetic
DIVMTQTPLSLPVTPGEPASISCRSSKSLLHSNGITYLYWYLQKPGQSPQLLIYQMSNLVSGVPDRFSGSGSGTDFTLKISRVEAEDVGVYYCAQNLELPYTFGGGTKVEIKRTVAAPSVFIFPPSDEQLKSGTASVVCLLNNFYPREAKVQWKVDNALQSGNSQESVTEQDSKDSTYSLSSTLTLSKADYEKHKVYACEVTHQGLSSPVTKSFNRGECDKTHTCPPCPAPEAEGAPSVFLFPPKPKDTLMISRTPEVTCVVVDVSHEDPEVKFNWYVDGVEVHNAKTKPREEQYNSTYRVVSVLTVLHQDWLNGKEYKCKVSNKALPSSIEKTISKAKGQPREPQVYTLPPSREEMTKNQVSLTCLVKGFYPSDIAVEWESNGQPENNYKTTPPVLDSDGSFFLYSKLTVDKSRWQQGNVFSCSVMHEALHNRFTQKSLSLSPGK

SEQ ID NO: 481 - protein, 678 aa, Artificial
  Synthetic
QVQLVQSGAEVKKPGSSVKVSCKASGYAFSYSWINWVRQAPGQGLEWMGRIFPGDGDTDYNGKFKGRVTITADKSTSTAYMELSSLRSEDTAVYYCARNVFDGYWLVYWGQGTLVTVSSASTKGPSVFPLAPSSKSTSGGTAALGCLVKDYFPEPVTVSWNSGALTSGVHTFPAVLQSSGLYSLSSVVTVPSSSLGTQTYICNVNHKPSNTKVDKRVEPKSCDKTHTCPPCPAPEAEGAPSVFLFPPKPKDTLMISRTPEVTCVVVDVSHEDPEVKFNWYVDGVEVHNAKTKPREEQYNSTYRVVSVLTVLHQDWLNGKEYKCKVSNKALPSSIEKTISKAKGQPREPQVYTLPPSREEMTKNQVSLTCLVKGFYPSDIAVEWESNGQPENNYKTTPPVLDSDGSFFLYSKLTVDKSRWQQGNVFSCSVMHEALHNHYTQKSLSLSPGSTGSEVQLVQSGAEVKKSGESLKISCKGSGYSFTSYWIGWVRQMPGKGLEWMGIFYPGDSSTRYSPSFQGQVTISADKSVNTAYLQWSSLKASDTAMYYCARRRNWGNAFDIWGQGTMVTVSSRTVAAPSVFIFPPSDEQLKSGTASVVCLLNNFYPREAKVQWKVDNALQSGNSQESVTEQDSKDSTYSLSSTLTLSKADYEKHKVYACEVTHQGLSSPVTKSFNRGEC

SEQ ID NO: 482 - protein, 345 aa, Artificial
  Synthetic
EIVLTQSPGTLSLSPGERATLSCRASQSVSSSYLAWYQQKPGQAPRLLIYGASSRATGIPDRFSGSGSGTDFTLTISRLEPEDFAVYYCQQYGSSTWTFGQGTKVEIKASTKGPSVFPLAPSSKSTSGGTAALGCLVKDYFPEPVTVSWNSGALTSGVHTFPAVLQSSGLYSLSSVVTVPSSSLGTQTYICNVNHKPSNTKVDKRVEPKSCDKTHSGGGGSGGGGSGGGGSNWVNVISDLKKIEDLIQSMHIDATLYTESDVHPSCKVTAMKCFLLELQVISLESGDASIHDTVENLIILANNSLSSNGNVTESGCKECEELEEKNIKEFLQSFVHIVQMFINTS

SEQ ID NO: 483 - protein, 441 aa, Artificial
  Synthetic
EIVLTQSPATLSLSPGERATLSCRASQSVRSYLAWYQQKPGQAPRLLFSDASNRATGIPARFSGSGSGTDFTLTISSLEPEDFAVYYCQQYRYSPRTFGQGTKVEIKRTVAAPSVFIFPPSDEQLKSGTASVVCLLNNFYPREAKVQWKVDNALQSGNSQESVTEQDSKDSTYSLSSTLTLSKADYEKHKVYACEVTHQGLSSPVTKSFNRGECDKTHTCPPCPAPELLGGPSVFLFPPKPKDTLMISRTPEVTCVVVDVSHEDPEVKFNWYVDGVEVHNAKTKPREEQYNSTYRVVSVLTVLHQDWLNGKEYKCKVSNKALPAPIEKTISKAKGQPREPQVYTLPPSREEMTKNQVSLTCLVKGFYPSDIAVEWESNGQPENNYKTTPPVLDSDGSFFLYSKLTVDKSRWQQGNVFSCSVMHEALHNRFTQKSLSLSPGK

SEQ ID NO: 484 - protein, 677 aa, Artificial; identical to SEQ ID NO: 472
  Synthetic

SEQ ID NO: 485 - protein, 344 aa, Artificial; identical to SEQ ID NO: 443
  Synthetic

SEQ ID NO: 486 - protein, 446 aa, Artificial; identical to SEQ ID NO: 205
  Synthetic

SEQ ID NO: 487 - protein, 679 aa, Artificial; identical to SEQ ID NO: 176
  Synthetic

SEQ ID NO: 488 - protein, 387 aa, Artificial; identical to SEQ ID NO: 446
  Synthetic

SEQ ID NO: 489 - protein, 446 aa, Artificial; identical to SEQ ID NO: 480
  Synthetic

SEQ ID NO: 490 - protein, 678 aa, Artificial; identical to SEQ ID NO: 481
  Synthetic

SEQ ID NO: 491 - protein, 388 aa, Artificial
  Synthetic
EIVLTQSPGTLSLSPGERATLSCRASQSVSSSYLAWYQQKPGQAPRLLIYGASSRATGIPDRFSGSGSGTDFTLTISRLEPEDFAVYYCQQYGSSTWTFGQGTKVEIKASTKGPSVFPLAPSSKSTSGGTAALGCLVKDYFPEPVTVSWNSGALTSGVHTFPAVLQSSGLYSLSSVVTVPSSSLGTQTYICNVNHKPSNTKVDKRVEPKSCDKTHSGGSGGGGSGGGGSGGYFGKLESKLSVIRNLNDQVLFIDQGNRPLFEDMTDSDCRDNAPRTIFIISKYGDSGARGLAVTISVKCEKISTLSCENKIISFKEMNPPDNIKDTKSDIIFFERDVPGHSGKVQFESSSYEGYFLACEKERDLFKLILKKEDELGDRSIMFTVQNED

SEQ ID NO: 492 - protein, 441 aa, Artificial; identical to SEQ ID NO: 483
  Synthetic

SEQ ID NO: 493 - protein, 677 aa, Artificial; identical to SEQ ID NO: 472
  Synthetic

SEQ ID NO: 494 - protein, 387 aa, Artificial; identical to SEQ ID NO: 446
  Synthetic

SEQ ID NO: 495 - protein, 446 aa, Artificial; identical to SEQ ID NO: 205
  Synthetic

SEQ ID NO: 496 - protein, 679 aa, Artificial; identical to SEQ ID NO: 176
  Synthetic

SEQ ID NO: 497 - protein, 394 aa, Artificial; identical to SEQ ID NO: 449
  Synthetic

SEQ ID NO: 498 - protein, 446 aa, Artificial; identical to SEQ ID NO: 480
  Synthetic

SEQ ID NO: 499 - protein, 678 aa, Artificial; identical to SEQ ID NO: 481
  Synthetic

SEQ ID NO: 500 - protein, 395 aa, Artificial
  Synthetic
EIVLTQSPGTLSLSPGERATLSCRASQSVSSSYLAWYQQKPGQAPRLLIYGASSRATGIPDRFSGSGSGTDFTLTISRLEPEDFAVYYCQQYGSSTWTFGQGTKVEIKASTKGPSVFPLAPSSKSTSGGTAALGCLVKDYFPEPVTVSWNSGALTSGVHTFPAVLQSSGLYSLSSVVTVPSSSLGTQTYICNVNHKPSNTKVDKRVEPKSCDKTHSGGGGSGGGGSGGGGSDLPQTHSLGSRRTLMLLAQMRRISLFSCAKDRHDFGFPQEEFGNQFQKAETIPVLHEMIQQIFNLFSTKDSSAAWDETLLDKFYTELYQQLNDLEACVIQGVGVTETPLMKEDSILAVRKYFQRITLYLKEKKYSPCAWEVVRAEIMRSFSLSTNLQESLRSKE

SEQ ID NO: 501 - protein, 441 aa, Artificial; identical to SEQ ID NO: 483
  Synthetic

SEQ ID NO: 502 - protein, 677 aa, Artificial; identical to SEQ ID NO: 472
  Synthetic

SEQ ID NO: 503 - protein, 394 aa, Artificial; identical to SEQ ID NO: 449
  Synthetic

SEQ ID NO: 504 - protein, 120 aa, Artificial
  Synthetic
QVQLVQSGAEVKKPGESLKVSCKASGYTFTSYYMHWVRQAPGQGLEWMGAIEPMYGSTSYAQKFQGRVTMTRDTSTSTVYMELSSLRSEDTAVYYCARGSAYYYDFADYWGQGTLVTVSS

SEQ ID NO: 505 - protein, 106 aa, Artificial
  Synthetic
SYVLTQPSSVSVAPGQTATISCGGHNIGSKNVHWYQQRPGQSPVLVIYQDNKRPSGIPERFSGSNSGNTATLTISGTQAMDEADYYCQVWDNYSVLFGGGTKLTVL

SEQ ID NO: 506 - protein, 120 aa, Artificial
  Synthetic
QVQLVQSGAEVKKPGESLKVSCKASGYTFTSYYMHWVRQAPGQGLEWMGIINPSGGSTSYAQKFQGRVTMTRDTSTSTVYMELSSLRSEDTAVYYCARGSAYYYDFADYWGQGTLVTVSS

SEQ ID NO: 507 - protein, 106 aa, Artificial; identical to SEQ ID NO: 505
  Synthetic

SEQ ID NO: 508 - protein, 122 aa, Artificial
  Synthetic
EVQLVESGGELVQAGGSLRLSCAASGLTFSSYNMGWFRRAPGKEREFVASITWSGRDTFYADSVKGRFTISRDNAKNTVYLQMSSLKPEDTAVYYCAANPWPVAAPRSGTYWGQGTQVTVSS

SEQ ID NO: 509 - protein, 18 aa, artificial
  synthetic
GEGTSTGSGGSGGSGGAD

1. A multispecific protein which is capable of binding to an antigen of interest expressed by a target cell, and which is further capable of binding to NKp46, a cytokine receptor and optionally CD16A at the surface of an NK cell, and which multispecific protein is capable of potentiating NK cell cytotoxicity toward a target cell expressing an antigen of interest, the multispecific protein comprising:
(a) an antigen binding domain (ABD) that binds to an antigen of interest;
(b) an ABD that binds to a human NKp46 polypeptide;
(c) an Fc domain, or a portion an Fc domain capable of binding FcRn; and
(d) an ABD that binds a human cytokine receptor present on NK cells,
wherein:
the ABD that binds to a human NKp46 polypeptide is connected to the Fc domain, optionally via an Ig-derived or non-Ig-derived polypeptide linker, and wherein the the ABD that binds a human cytokine receptor is connected, via a polypeptide linker, to the ABD that binds to a human NKp46 polypeptide or to the Fc domain.

2. The protein of claim 1, wherein the protein has only one ABD that binds to an antigen of interest, such that the protein binds to the antigen of interest monovalently, optionally further wherein the protein has only one ABD that binds to a human NKp46 polypeptide, only one ABD that binds a cytokine receptor, and only one Fc domain dimer.

3. The protein of claim 1 or 2, wherein the ABD that binds the cytokine receptor is connected via a polypeptide linker to the ABD that binds NKp46.

4. The protein of claims 1, 2 or 3, wherein the ABD that binds to a human NKp46 polypeptide and the ABD that binds a human cytokine receptor, and optionally further the Fc domain, are positioned within the multispecific protein in series with respect to the N- and C-termini of the multispecific protein.

5. The protein of any one of the above claims, wherein the ABD that binds to a human NKp46 polypeptide and the ABD that binds a human cytokine receptor, and optionally the Fc domain, are configured to be capable of adopting a membrane-planar binding conformation such that the protein is capable of binding to NKp46 and the cytokine receptor, and optionally further CD16A, on the surface of an NK cell.

6. The protein of any one of the above claims, wherein the ABD that binds a human cytokine is connected to the ABD that binds to a human NKp46 polypeptide or the Fc domain by a linker peptide having 20 or less than 20 amino acid residues, optionally less than 15 amino acid residues, optionally less than 10 amino acid residues, optionally between 5 and 15 residues, optionally between 5 and 10 residues, optionally between 3 and 5 residues.

7. The protein of any one of the above claims, wherein the ABD that binds to a human NKp46 polypeptide is connected to the Fc domain by a linker peptide having 15 or less than 15 amino acid residues, optionally less than 10 amino acid residues, optionally between 4 and 15 residues, optionally between 3 and 10 residues, optionally between 4 and 5 residues.

8. The protein of any one of the above claims, wherein the ABD that binds to a human NKp46 polypeptide is connected to the Fc domain by an immunoglulin-derived linker peptide having 20 or less than 20 amino acid residues, optionally less than 15 amino acid residues, optionally between 4 and 15 residues, optionally between 4 and 10 residues, optionally between 3 and 5 residues, optionally wherein the linker comprises the amino acid sequence RTVA.

9. The protein of any one of the foregoing claims, wherein the ABD that binds NKp46 is interposed between the Fc domain and the ABD that binds the cytokine receptor.

10. The protein of any one of the foregoing claims, wherein each ABD comprises a V_{H} and/or V_{L} domain or fragment thereof, optionally wherein a VH and/or VL comprises three complementary determining regions (CDR1, CDR2 and CDR-3).

11. A protein comprising an ABD that binds to a human NKp46 polypeptide fused, optionally via a domain linker having 15 or less than 15 amino acid residues, to a cytokine that binds a receptor expressed at the surface of an NK cell.

12. The protein of claim of any one of the above claims, wherein the ABD that binds to a human NKp46 polypeptide comprises a V_{H} and/or V_{L} domain that binds to the D1/D2 junction of the human NKp46 polypeptide, and wherein the cytokine is a modified IL-2 polypeptide.

13. The protein of claim 11 or 12, wherein the ABD that binds to a human NKp46 polypeptide is fused at its C-terminus, via a domain linker, to the N-terminus of the cytokine, optionally wherein the ABD that binds to a human NKp46 polypeptide has an scFv or a Fab structure.

14. The protein of any one of the foregoing claims, wherein the protein is a heterodimer comprising a first and second polypeptide chain, or a heterotimer comprising a first, second and third polypeptide chain.

15. The protein of any one of the foregoing claims, comprising:
(i) a first polypeptide chain comprising, from N- to C-terminal, a variable domain that binds NKp46, a human CH1 or CL constant domain, optionally a domain linker, and a wild-type or variant IL-2, IL-15, IL-21, IL-7, IL-27, IL-12, IL-18, IFN-α or IFN-β polypeptide, and
(ii) a second polypeptide chain comprising, from N- to C-terminal, a variable domain that associates with the variable domain of (i) to form a NKp46-binding domain, and a human CH1 or CL constant domain;
wherein one of the constant domains of (i) and (ii) is a CH1 and the other is a CL such that the constants domains of (i) and (ii) associate by CH1-CL dimerization.

16. The protein of any one of the foregoing claims, wherein the protein comprises a NKp46 ABD-cytokine unit having a domain arrangement: [chemical structure]
wherein:
Vₐ₋₂ and V_{b-2} are each a V_{H} domain or a V_{L} domain, wherein one of Vₐ₋₂ and V_{b-2} is a V_{H} and the other is a V_{L} and wherein Vₐ₋₂ and V_{b-2} form a second ABD that binds NKp46;
CH1 is a human immunoglobulin CH1 domain and CL is a human light chain constant domain;
one of (CH1 or CL)ₐ and (CH1 or CL)_{b} is a CH1 and the other is a CL such that a (CH1/CL) pair is formed;
L is a domain linker; and
Cyt is a cytokine polypeptide or portion thereof that binds to a cytokine receptor present on NK cells, optionally wherein Cyt is a wild-type or variant human IL-2, IL-15, IL-21, IL-7, IL-27, IL-12, IL-18, IFN-α or IFN-β polypeptide.

17. The protein of any one of the foregoing claims, comprising:
(a) (i) a first polypeptide chain comprising, from N- to C-terminal, an NKp46-binding domain or portion thereof comprising a variable domain comprising an amino acid sequence at least 80%, 90%, 95%, 98% or 99% identical to an amino acid sequence of any of SEQ ID NOS: 3, 5, 7, 9, 11, 13, 112, 113, 115, 116, 117, 119, 120, 121, 123, 124, 125, 127, 128, 129 or 236-313, a human CH1 or CL constant domain, a domain linker, and a wild-type or variant IL-2, IL-15, IL-21, IL-7, IL-27, IL-12, IL-18, IFN-α or IFN-β polypeptide comprising an amino acid sequence at least 80%, 90%, 95%, 98% or 99% identical to an amino acid sequence of any of SEQ ID NOS: 404-439 or to a fragment thereof of at least 40, 50, 60, 80 or 100 contiguous amino acids thereof, and (ii) a second polypeptide chain comprising, from N- to C-terminal, a variable domain that associates with the variable domain of (i) to form a NKp46-binding domain wherein the variable domain comprises an amino acid sequence at least 80%, 90%, 95%, 98% or 99% identical to an amino acid sequence of any of SEQ ID NOS: 4, 6, 8, 10, 12, 14, 114, 118, 122, 126, 130 or 314-403, and a human CH1 or CL constant domain; or
(b) (i) a first polypeptide chain comprising, from N- to C-terminal, an NKp46-binding domain or portion thereof comprising a variable domain comprising an amino acid sequence at least 80%, 90%, 95%, 98% or 99% identical to an amino acid sequence of any of SEQ ID NOS: 4, 6, 8, 10, 12, 14, 114, 118, 122, 126, 130 or 314-403, a human CH1 or CL constant domain, a domain linker, and a wild-type or variant IL-2, IL-15, IL-21, IL-7, IL-27, IL-12, IL-18, IFN-α or IFN-β polypeptide comprising an amino acid sequence at least 80%, 90%, 95%, 98% or 99% identical to an amino acid sequence of any of SEQ ID NOS: 404-439 or to a fragment thereof of at least 40, 50, 60, 80 or 100 contiguous amino acids thereof, and
(ii) a second polypeptide chain comprising, from N- to C-terminal, a variable domain that associates with the variable domain of (i) to form a NKp46-binding domain wherein the variable domain comprises an amino acid sequence at least 80%, 90%, 95%, 98% or 99% identical to an amino acid sequence of any of SEQ ID NOS: 3, 5, 7, 9, 11, 13, 112, 113, 115, 116, 117, 119, 120, 121, 123, 124, 125, 127, 128, 129 or 236-313, and a human CH1 or CL constant domain.

18. The protein of any one of claims 1-13, wherein the protein comprises a polypeptide comprising a NKp46 ABD-cytokine unit having a domain arrangement
L1-Vₐ₋₂-L2-V_{b-2}-L3-Cyt
wherein:
Vₐ₋₂ and V_{b-2} are each a V_{H} domain or a V_{L} domain, wherein one of Vₐ₋₂ and V_{b-2} is a V_{H} and the other is a V_{L} and wherein Vₐ₋₂ and V_{b-2} form a second ABD that binds NKp46; L1, L2 and L3 are each a domain linker, wherein L1, L2 and L3 can be different or the same, wherein L1 is a domain linker connecting the NKp46 ABD-cytokine unit to the rest of the protein; and Cyt is a cytokine polypeptide or portion thereof that binds to a cytokine receptor present on NK cells, optionally wherein Cyt is a wild-type or variant human IL-2, IL-15, IL-21, IL-7, IL-27, IL-12, IL-18, IFN-α or IFN-β polypeptide.

19. The protein of any one of the foregoing claims, wherein the ABD that binds a cytokine receptor comprises an IL-2 polypeptide displaying reduced binding to CD25 compared to a wild-type human IL-2 polypeptide.

20. The protein of any one of the foregoing claims, wherein the protein or the ABD that binds to a human NKp46 polypeptide binds human NKp46 polypeptide with a KD of between 1 and 100 nM, as determined by SPR and/or wherein the protein or the cytokine binds the human cytokine receptor with a KD of between 10 nM and 1 μM, as determined by SPR.

21. The protein of any one of the above claims, wherein the multispecific polypeptide binds to a human Fcγ receptor, optionally CD16A, with an affinity for monovalent binding, as assessed by surface plasmon resonance, that is substantially equivalent to that of a full-length wild type human IgG1 antibody.

22. The protein of any one of the above claims, wherein the protein, immobilized on a surface, binds a soluble human CD16A polypeptide with a KD for monovalent binding that is no more than 2000 nM, optionally 1000-2000 nM, optionally 1100 or 1300 nM, as determined by surface plasmon resonance using Biacore.

23. The protein of any one of the foregoing claims, wherein the cytokine receptor is a receptor present at the surface of NK cells and that associates with the common γ-chain (γC; CD132), optionally further wherein wherein the cytokine receptor is the mid-affinity IL-2/IL-15Rβ receptor (CD122) or IL-21R (CD360), and optionally wherein the cytokine polypeptide is IL-2, IL-15 or IL-21.

24. The protein of any one of claims 1-17 or 19-23, wherein the protein is an isolated heterotrimeric polypeptide comprising:
(a) a first polypeptide chain comprising, from N- to C-terminus, a first variable domain (V), a first CH1 of CK constant region, a Fc domain or portion thereof, a second variable domain (V) and a second CH1 of CK constant region;
(b) a second polypeptide chain comprising, from N- to C-terminus, a first variable domain (V), a CH1 or CK constant region, and a Fc domain or portion thereof, wherein the V domain and CH1 or Cκ constant region are selected to be complementary to the first V domain and first CH1 or Cκ constant region of the first polypeptide chain such that the first and second polypeptides form a CH1-Cκ heterodimer in which the first variable domain of the first polypeptide chain and the first variable domain of the second polypeptide form a first antigen binding domain that binds the antigen of interest; and
(c) a third polypeptide chain comprising, from N- to C-terminus, a variable domain (V) and a CH1 or CK constant region, wherein the V domain and CH1 or Cκ constant region are selected to be complementary to the second V domain and second CH1 or Cκ constant region of the first polypeptide chain such that the first and third polypeptides form a CH1-Cκ heterodimer in which the second variable domain of the first polypeptide chain and the variable domain of the third polypeptide form a second antigen binding domain that binds NKp46, and
wherein one of the first or third polypeptide chains further comprises a cytokine, optionally an IL-2, IL-15, IL-21, IL-7, IL-27, IL-12, IL-18, IFN-α or IFN-β polypeptide, optionally an IL-2v or IL15v, covalently attached, optionally via a domain linker, to its C-terminus.

25. The multispecific protein of claims 1-17 or 19-24, wherein the protein is a heterotrimer having a polypeptide chain 1, 2 and 3: [chemical structure]
wherein:
Vₐ₋₁, V_{b-1}, Vₐ₋₂ and V_{b-2} are each a V_{H} domain or a V_{L} domain, wherein one of Vₐ₋₁ and V_{b-1} is a V_{H} and the other is a V_{L} and wherein Vₐ₋₁ and V_{b-1} form a first antigen binding domain (ABD) that binds an antigen of interest, wherein one of Vₐ₋₂ and V_{b-2} is a V_{H} and the other is a V_{L} and wherein Vₐ₋₂ and V_{b-2} form a second ABD that binds NKp46;
CH1 is a human heavy chain constant domain 1 and CL is a human light chain constant domain;
one of (CH1 or CL)ₐ and (CH1 or CL)_{c} is a CH1 and the other is a CL such that a (CH1/CL) pair is formed;
one of (CH1 or CL)_{b} and (CH1 or CL)_{d} is a CH1 and the other is a CL such that a (CH1/CL) pair is formed;
Hinge is an immunoglobulin hinge region or portion thereof;
L1 and L2 are each a domain linker, wherein L1 and L2 can be different or the same;
CH2 and CH3 are human immunoglobulin CH2 and CH3 domains, respectively; and
Cyt is a cytokine polypeptide or portion thereof that binds to a cytokine receptor present on NK cells, optionally wherein Cyt is a wild-type or variant human IL-2, IL-15, IL-21, IL-7, IL-27, IL-12, IL-18, IFN-α or IFN-β polypeptide.

26. The protein of any one of claims 1-17 or 19-25, having the domain arrangement:

[chemical structure]

27. The protein of any one of claims 1-17 or 19-24, wherein the protein is a heterotrimer having a polypeptide chain 1, 2 and 3: [chemical structure]
wherein:
Vₐ₋₁, V_{b-1}, Vₐ₋₂ and V_{b-2} are each a V_{H} domain or a V_{L} domain, wherein one of Vₐ₋₁ and V_{b-1} is a V_{H} and the other is a V_{L} and wherein Vₐ₋₁ and V_{b-1} form a first antigen binding domain (ABD) that binds an antigen of interest, wherein one of Vₐ₋₂ and V_{b-2} is a V_{H} and the other is a V_{L} and wherein Vₐ₋₂ and V_{b-2} form a second ABD that binds NKp46;
CH1 is a human heavy chain constant domain 1 and CL is a human light chain constant domain;
one of (CH1 or CL)ₐ and (CH1 or CL)_{c} is a CH1 and the other is a CL such that a (CH1/CL) pair is formed;
one of (CH1 or CL)_{b} and (CH1 or CL)_{d} is a CH1 and the other is a CL such that a (CH1/CL) pair is formed;
Hinge is an immunoglobulin hinge region or portion thereof;
L1 and L2 are each a domain linker, wherein L1 and L2 can be different or the same;
CH2 and CH3 are human immunoglobulin CH2 and CH3 domains, respectively; and
Cyt is a cytokine polypeptide or portion thereof that binds to a cytokine receptor present on NK cells, optionally wherein Cyt is a wild-type or variant human IL-2, IL-15, IL-21, IL-7, IL-27, IL-12, IL-18, IFN-α or IFN-β polypeptide.

28. The protein of any one of claims 1-17, 19-24 or 27, having the domain arrangement:

[chemical structure]

29. The protein of any one of claims 1-14 or 18-23, wherein the protein is an isolated heterodimeric polypeptide comprising:
(a) a first polypeptide chain comprising, from N- to C-terminus, a first variable domain (V), a CH1 of Cκ constant region, a Fc domain or portion thereof, a second variable domain and a third variable domain, and a wild-type or variant cytokine that binds to a cytokine receptor present on NK cells; and
(b) a second polypeptide chain comprising, from N- to C-terminus, a first variable domain (V), a CH1 or CK constant region, and a Fc domain or portion thereof, wherein the CH1 or Cκ constant region is selected to be complementary to the CH1 or Cκ constant region of the first polypeptide chain such that the first and second polypeptides form a CH1-Cκ heterodimer in which the first variable domain of the first polypeptide chain and the first variable domain of the second polypeptide form a first antigen binding domain; and wherein the second variable domain and third variable domain forms a second antigen binding domain.

30. The protein of any one of claims 1-14, 18-23 or 29, wherein the protein is a heterodimer having a polypeptide chain 1 and 2: [chemical structure]
wherein:
Vₐ₋₁, V_{b-1}, Vₐ₋₂ and V_{b-2} are each a V_{H} domain or a V_{L} domain, wherein one of Vₐ₋₁ and V_{b-1} is a V_{H} and the other is a V_{L} and wherein Vₐ₋₁ and V_{b-1} form a first antigen binding domain (ABD) that binds an antigen of interest, wherein one of Vₐ₋₂ and V_{b-2} is a V_{H} and the other is a V_{L} and wherein Vₐ₋₂ and V_{b-2} form a second ABD that binds NKp46;
CH1 is a heavy chain constant domain 1 and CL is a light chain constant domain;
one of (CH1 or CL)ₐ and (CH1 or CL)_{b} is a CH1 and the other is a CL such that a (CH1/CL) pair is formed;
Hinge is an immunoglobulin hinge region or portion thereof;
L1, L2 and L3 are each a domain linker, wherein L1, L2 and L3 can be different or the same;
CH2 and CH3 are human immunoglobulin CH2 and CH3 domains, respectively; and
Cyt is a cytokine polypeptide or portion thereof that binds to a cytokine receptor present on NK cells, optionally wherein Cyt is a wild-type or variant human IL-2, IL-15, IL-21, IL-7, IL-27, IL-12, IL-18, IFN-α or IFN-β polypeptide.

31. The protein of any one of the above claims, wherein the ABD that binds to an antigen of interest comprises an immunoglobulin heavy chain variable domain (VH) and an immunoglobulin light chain variable domain (VL), wherein the VH region comprises an amino acid sequence having at least about 80%, 85%, 90%, 95%, 97%, 98% or 99% identity, to the amino acid sequence of SEQ ID NOS: 132, 134, 136, 138, 140, 142, 144, 146, 148, 150, 152, 154 or any of 236-313, and wherein the VL comprises an amino acid sequence having at least about 80%, 85%, 90%, 95%, 97%, 98% or 99% identity, to the amino acid sequence of SEQ ID NOS: 133, 135, 137, 139, 141, 143, 145, 147, 149, 151, 153, 155 or any of 314-403.

32. The protein of any one of the above claims, wherein the ABD that binds to NKp46 comprises an immunoglobulin heavy chain variable domain (VH) and an immunoglobulin light chain variable domain (VL), wherein the VH region comprises an amino acid sequence having at least about 80%, 85%, 90%, 95%, 97%, 98% or 99% identity, to the amino acid sequence of SEQ ID NOS: 3, 5, 7, 9, 11, 13, 112, 113, 115, 116, 117, 119, 120, 121, 123, 124, 125, 127, 128, 129 or any of 236-313, and wherein the VL comprises an amino acid sequence having at least about 80%, 85%, 90%, 95%, 97%, 98% or 99% identity, to the amino acid sequence of SEQ ID NOS: 4, 6, 8, 10, 12, 14, 114, 118, 122, 126, 130 or any of 314-403.

33. The protein of any one of the above claims, wherein an Fc domain comprises an amino acid sequence having at least about 80%, 85%, 90%, 95%, 97%, 98% or 99% identity to the Fc polypeptide of any of SEQ ID NOS: 160-165.

34. The protein of any one of the above claims, wherein a CH1 domain comprises an amino acid sequence having at least about 80%, 85%, 90%, 95%, 97%, 98% or 99% identity to the CH1 polypeptide of any of SEQ ID NOS: 156.

35. The protein of any one of the above claims, wherein a CK or CL domain comprises an amino acid sequence having at least about 80%, 85%, 90%, 95%, 97%, 98% or 99% identity to the CK polypeptide of any of SEQ ID NOS: 156.

36. The protein of any one of the above claims, wherein the multispecific protein comprises:
(a) an ABD that binds to the antigen of interest, wherein the ABD comprises an scFv or Fab,
a. wherein the scFv comprises a VH comprising an amino acid sequence at least 90% identical to a sequence selected from SEQ ID NOS: 132, 134, 136, 138, 140, 142, 144, 146, 148, 150, 152, 154 and any of 236-313, a domain linker, and a VL comprising an amino acid sequence at least 90% identical to a sequence selected from SEQ ID NOS: 133, 135, 137, 139, 141, 143, 145, 147, 149, 151, 153, 155 and any of 314-403; and
b. wherein the Fab comprises one VH comprising an amino acid sequence at least 90% identical to a selected from SEQ ID NOS: 132, 134, 136, 138, 140, 142, 144, 146, 148, 150, 152, 154 and any of 236-313, one VL comprising an amino acid sequence at least 90% identical to a sequence selected from SEQ ID NOS: 133, 135, 137, 139, 141, 143, 145, 147, 149, 151, 153, 155 and any of 314-403, one human CH1 domain comprising an amino acid sequence at least 90% identical to SEQ ID NO: 156 and one human CL domain comprising an amino acid sequence at least 90% identical to SEQ ID NOS: 159, wherein the VH is fused to one of the CH1 or CL domains, and the VL is fused to the other of the CH1 or CL domains,
(b) an ABD that binds to a human NKp46 polypeptide, wherein the ABD comprises an scFv or Fab,
a. wherein the scFv comprises a VH comprising an amino acid sequence at least 90% identical to a sequence selected from SEQ ID NOS: 3, 5, 7, 9, 11, 13, 112, 113, 115, 116, 117, 119, 120, 121, 123, 124, 125, 127, 128, 129 and any of 236-313, a domain linker, and a VL comprising an amino acid sequence at least 90% identical to a sequence selected from SEQ ID NOS: 4, 6, 8, 10, 12, 14, 114, 118, 122, 126, 130 and any of 314-403; and
b. wherein the Fab comprises one VH comprising an amino acid sequence at least 90% identical to a selected from SEQ ID NOS: 3, 5, 7, 9, 11, 13, 112, 113, 115, 116, 117, 119, 120, 121, 123, 124, 125, 127, 128, 129 and any of 236-313, one VL comprising an amino acid sequence at least 90% identical to a sequence selected from SEQ ID NOS: 4, 6, 8, 10, 12, 14, 114, 118, 122, 126, 130 and any of 314-403, one human CH1 domain comprising an amino acid sequence at least 90% identical to SEQ ID NO: 156 and one human CL domain comprising an amino acid sequence at least 90% identical to SEQ ID NOS: 159, wherein the VH is fused to one of the CH1 or CL domains, and the VL is fused to the other of the CH1 or CL domains,
(c) a Fc domain dimer comprising a first and second Fc monomer wherein each Fc monomer comprises an amino acid sequence at least 80% or 90% identical to a sequence selected from SEQ ID NOS: 160-165; and
(d) a cytokine polypeptide comprising an amino acid sequence at least 80% or 90% identical to a sequence selected from SEQ ID NOS: 404-439, or to a contiguous sequence of at least 40, 50, 60, 70, 80 or 100 amino acid residues thereof, fused, via a domain linker, to the C-terminus of one of the polypeptide chains of the multispecific protein.

37. The protein of any one of the above claims, wherein the target cell is a tumor cell.

38. The protein of any one of the above claims, wherein the antigen of interest is a cancer antigen.

39. The protein of any one of claims 1-37, wherein the antigen of interest is expressed by an infectious agent or infected cell.

40. The protein of any one of the above claims, wherein the multispecific protein competes for binding to a NKp46 polypeptide with a monoclonal antibody comprising the NKp46-1, NKp46-2, NKp46-3, NKp46-4, NKp46-6 or NKp46-9 VH and VL domains.

41. The protein of any one of the above claims, wherein the multispecific protein has decreased binding to a mutant NKp46 polypeptide selected from the group consisting of:
(a) a mutant NKp46 polypeptide having a mutation at residues R101, V102, E104 and/or L105 compared to binding to the wild-type NKp46;
(b) a mutant NKp46 polypeptide having a mutation any one or more of the residues K41, E42, E119, Y121 and/or Y194 compared to binding to the wild-type NKp46; and
(c) a mutant NKp46 polypeptide having a mutation any one or more of the residues P132, E133, 1135, and/or S136 compared to binding to the wild-type NKp46.

42. The protein of any one of the above claims, wherein the antigen binding domain that binds NKp46 comprises:
(a) a heavy chain comprising CDR 1, 2 and 3 of the heavy chain variable region of SEQ ID NO: 3 and a light chain comprising CDR 1, 2 and 3 of the light chain variable region of SEQ ID NO: 4;
(b) a heavy chain comprising CDR 1, 2 and 3 of the heavy chain variable region of SEQ ID NO: 5 and a light chain comprising CDR 1, 2 and 3 of the light chain variable region of SEQ ID NO: 6;
(c) a heavy chain comprising CDR 1, 2 and 3 of the heavy chain variable region of SEQ ID NO: 7 and a light chain comprising CDR 1, 2 and 3 of the light chain variable region of SEQ ID NO: 8;
(d) a heavy chain comprising CDR 1, 2 and 3 of the heavy chain variable region of SEQ ID NO: 9 and a light chain comprising CDR 1, 2 and 3 of the light chain variable region of SEQ ID NO: 10;
(e) a heavy chain comprising CDR 1, 2 and 3 of the heavy chain variable region of SEQ ID NO: 11 and a light chain comprising CDR 1, 2 and 3 of the light chain variable region of SEQ ID NO: 12; or
(f) a heavy chain comprising CDR 1, 2 and 3 of the heavy chain variable region of SEQ ID NO: 13 and a light chain comprising CDR 1, 2 and 3 of the light chain variable region of SEQ ID NO: 14.

43. A pharmaceutical composition comprising a multispecific protein of any one of the above claims, and a pharmaceutically acceptable carrier or adjuvant.

44. A recombinant cell which expresses at one, two, three of four of (or all of) the polypeptide chains of a multispecific protein according to any one of claims 1-42.

45. A method of preparing an NK cell composition, the method comprising incubating or contacting NK cells, optionally isolated NK cells, in vitro, with a multispecific protein according to any one of claims 1-42.

46. A composition of NK cells obtained according to the method of claim 45.

47. Use of a protein or composition of any one of claims 1-42, 43 or 46 as a medicament for the treatment of disease and/or in the manufacture of a medicament for the treatment of disease.

48. A method of potentiating NK cell activation, cytotoxicity and/or proliferation of NKp46⁺CD16⁺ NK cells and/or NKp46⁺CD16⁻ NK cells in a subject having a disease, the method comprising administering to the subject a multispecific protein according to any of claims 1-42.

49. A method delivering or bringing a highly potent cytokine to NK cells and/or to a tumor in a subject having a disease, optionally further with reduced toxicity, the method comprising administering to the subject a multispecific protein according to any of claims 1-42.

50. The method or use of claims 45-49, wherein the cytokine is a variant or wild-type cytokine or cytokine fragment thereof that retains at least 70%, 80% or 90% of the affinity for its cytokine receptor present on NK cells, compared to the wild-type cytokine counterpart.

51. The method or use of claims 45-50, wherein the multispecific protein (or the cytokine when included in the multispecific protein) exhibits an EC50 for cytokine pathway signaling in NK cells that is lower than that observed with the cytokine alone or in a protein in which the NKp46 ABD and/or a CD16 ABD are replaced by a control ABD, optionally wherein the EC50 for cytokine pathway signaling in NK cells is at least 10-fold or 100-fold lower, optionally wherein cytokine pathway signaling is assessed by bringing the cytokine into contact with an NK cell and measuring STAT phosphorylation in the NK cells.

52. The use of claims 47-51, wherein the disease is a cancer or infectious disease.

53. A method of making a heteromultimeric protein, comprising:
(a) providing a first nucleic acid encoding at least a first polypeptide chain according to any of claims 14-23 or 29-42;
(b) providing a second nucleic acid encoding at least a second polypeptide chain according to any of claims 14-23 or 29-42; and
(c) expressing said first and second nucleic acids in a host cell to produce a protein comprising said first and second polypeptide chains, respectively; loading the protein produced onto an affinity purification support, optionally a Protein-A support, and recovering the heteromultimeric protein.

54. A method of making a heteromultimeric protein, comprising:
(a) providing a first nucleic acid encoding a first polypeptide chain according to any of claims 14-28 or 31-42;
(b) providing a second nucleic acid encoding a second polypeptide chain according to any of claims 14-28 or 31-42;
(c) providing a third nucleic acid comprising a third polypeptide chain according to any of claims 14-28 or 31-42; and
(d) expressing said first, second and third nucleic acids in a host cell to produce a protein comprising said first, second and third polypeptide chains, respectively; loading the protein produced onto an affinity purification support, optionally a Protein-A support, and recovering the heteromultimeric protein.

55. A method for identifying or evaluating a polypeptide, comprising the steps of:
(a) providing nucleic acid(s) encoding one of more polypeptides of a protein of any of claims 1-42;
(b) expressing said nucleic acids in a host cell to produce said proteins, respectively; and recovering said protein; and
(c) evaluating the protein produced for a biological activity of interest.
